(19) United States
(12) Patent Application Publication
(10) Pub. No.: US 2026/0193649 A1
(43) Pub. Date: Jul. 9, 2026

(54) Branchpoint-Targeted Antisense Oligonucleotide for Restoring Pseudo-Exon Type Aberrant Splicing

(71) Applicant: Kyoto University, Kyoto (JP)

(72) Inventors: Masatoshi HAGIWARA, Kyoto (JP); Tomonari AWAYA, Kyoto (JP); Hiroaki OHARA, Kyoto (JP)

(73) Assignee: Kyoto University, Kyoto (JP)

(21) Appl. No.: 19/132,163

(22) PCT Filed: Nov. 22, 2023
(86) PCT No.: PCT/JP2023/041979

§ 371 Date: May 22, 2025

(30) Foreign Application Priority Data
Nov. 25, 2022 (JP) 2022-188542

(51) Int. Cl. C12N 15/113

(52) U.S. Cl. CPC C12N 15/113; C12N 2310/14; C12N 2310/321; C12N 2320/33

(57) ABSTRACT

In one aspect, the present disclosure provides an antisense oligonucleotide capable of correcting pseudo-exon-type aberrant splicing. In this aspect, the present disclosure provides an antisense oligonucleotide for correcting pseudo-exon-type aberrant splicing, having a base sequence capable of binding to a sequence that includes a branch point in pseudo-exon-type aberrant splicing.

### TECHNICAL FIELD

[0001] The present disclosure relates to a branch point-targeted antisense oligonucleotide for correcting pseudo-exon-type aberrant splicing.

### BACKGROUND ART

[0002] Splicing proceeds through a process in which, in RNA, a splice site at the end of an upstream exon binds to a branch point located downstream to temporarily form a lariat structure, followed by ligation after the lariat structure has been removed. The presence of aberrant branch points due to gene mutation alters the recognition of exon-intron boundaries, whereby proper splicing is disrupted. This leads to formation of incomplete mRNA in which sequences, such as introns, that are not normally used as exons (pseudo-exons) remain. As a result, translation of the mRNA into a protein stops in the middle of the process, and a necessary protein cannot be produced. Since this results in lack of the necessary protein, splicing defects can cause various diseases.

[0003] At present, more than fifteen nucleic acid therapeutics are approved worldwide, and five of them are approved also in Japan. For Duchenne muscular dystrophy, an exon skipping approach has been devised, in which an antisense oligonucleotide is used to induce exon 51 skipping. Further, exon trapping inhibitors applicable to Fukuyama congenital muscular dystrophy (FCMD) and using an antisense oligonucleotide are currently under investigator-initiated clinical trials (e.g., Patent Document 1 and Non-Patent Documents 1 and 2).

[0004] However, designing an antisense oligonucleotide requires an exhaustive search to select applicable genes and target sequences, and this requires a great deal of cost and effort. Moreover, such a great deal of cost and effort does not necessarily lead to successful designing of a sequence suitable for desired skipping of an exon. They have been a bottleneck in the development of antisense oligonucleotides.

### PRIOR ART DOCUMENTS

### Patent Document

[0005] Patent Document 1: JP 2013-216595A

### Non-Patent Documents

[0006] Non-Patent Document 1: Kobayashi, K., et al. (1998). Nature 394, 388-392.
[0007] Non-Patent Document 2: Taniguchi-Ikeda, M., et al. (2011). Nature 478, 127-131.

### DISCLOSURE OF INVENTION

### Problem to be Solved by the Invention

[0008] The present disclosure provides a novel antisense oligonucleotide capable of correcting pseudo-exon-type aberrant splicing.

### Means for Solving Problem

[0009] One aspect of the present disclosure relates to an antisense oligonucleotide for correcting pseudo-exon-type aberrant splicing, having a base sequence capable of binding to a sequence that includes a branch point in pseudo-exon-type aberrant splicing.

[0010] Another aspect of the present disclosure relates to an antisense oligonucleotide including a base sequence capable of binding to a target sequence consisting of 10 to 50 successive bases in a region selected from the group consisting of regions (1) to (40) to be described below, wherein the base sequence includes a branch point in pseudo-exon-type aberrant splicing.

[0011] Still another aspect of the present disclosure relates to a pharmaceutical composition containing the antisense oligonucleotide of the present disclosure.

[0012] Yet another aspect of the present disclosure relates to a method for producing an antisense oligonucleotide for correcting pseudo-exon-type aberrant splicing, comprising producing a base sequence that is complementary to a target sequence that includes a branch point in pseudo-exon-type aberrant splicing and consists of 10 to 50 bases.

### Effects of the Invention

[0013] According to one aspect of the present disclosure, a novel antisense oligonucleotide capable of correcting pseudo-exon-type aberrant splicing can be provided.

### DESCRIPTION OF THE INVENTION

[0014] An antisense oligonucleotide is typically designed so as to target, in a sequence that regulates exon recognition, two splice sites located upstream and downstream and splicing enhancers present inside and outside of an exon. However, this method has a problem in that, since the sequences of the splicing enhancers are not clear, it is difficult to identify in which part of the gene a target sequence appears. In order to solve this problem, a method of designing antisense oligonucleotides so as to comprehensively cover a wide region centered on the splice sites and evaluating the antisense oligonucleotides has been commonly employed. However, such a method also has problems in that it requires an exhaustive search over a wide region and thus requires a great deal of cost and effort, and that such a great deal of cost and effort does not necessarily lead to successful designing of a suitable sequence.

[0015] In light of these problems, the inventors of the present invention conducted studies to find a method that enables efficient designing of antisense oligonucleotides effective against a number of applicable diseases. In the course of these studies, the inventors focused on a branch point (BP). It is known that the branch point corresponds to any of adenine bases located 10 to 120 bases upstream of the 3′-splice site of an intron. Accordingly, it was expected that identification of the branch point would be relatively easy. Further, even when there is a plurality of candidate branch points, they can be evaluated easily because a region including the plurality of candidate branch points can be covered by designing several antisense oligonucleotides.

[0016] Based on these findings, the inventors made an attempt to design a branch point-targeted antisense oligonucleotide in order to correct pseudo-exon-type aberrant splicing in an applicable disease Fukuyama congenital muscular dystrophy, which is prevalent in Japan. As a result, antisense oligonucleotides that exhibit high pseudo-exon skipping efficiency and favorable restoration of target gene functions could be obtained efficiently in a very simple manner.

[0017] Branch points have alternative sites. Thus, there was a concern that, even if a particular branch point is inhibited, another branch point may act in a compensatory manner. However, such a problem did not occur.

[0018] In one or more embodiments, a branch point is a specific nucleotide (mainly adenine base) that is located upstream of the 3′-splice site of an intron and serves as a starting point of splicing. In other words, the branch point is present in a non-coding region. Upon binding of U2 snRNA to an adenine base as the branch point, a hydroxy group at the 2′-position of the adenine base attacks and cleaves the 5′-splice site at the 5′end of the intron. The thus-cleaved portion binds to the branch point (adenine base) to form a lariat structure, and the 3′-splice site at the 3′end of the intron is cleaved. As a result, the intron is cleaved off and then degraded.

### Antisense Oligonucleotide

[0019] One aspect of the present disclosure relates to an antisense oligonucleotide for correcting pseudo-exon-type aberrant splicing, having a base sequence capable of binding to a sequence including a branch point in pseudo-exon-type aberrant splicing. In one or more embodiments, the antisense oligonucleotide of the present disclosure has a base sequence capable of binding to a sequence including a branch point that serves as a starting point of pseudo-exon-type aberrant splicing. Accordingly, by binding the antisense oligonucleotide of the present disclosure to the sequence including the branch point, binding of U2 snRNP to the branch point is suppressed, whereby the occurrence of pseudo-exon-type aberrant splicing can be corrected. In addition, in one or more embodiments, the antisense oligonucleotide of the present disclosure can increase the production of correctly spliced transcripts and thus can treat diseases caused by pseudo-exon-type aberrant splicing.

[0020] In one or more embodiments, pseudo-exon-type aberrant splicing is aberrant splicing resulting from recognition of a non-coding region as a pseudo-exon due to mutation in an intron region.

[0021] In one or more embodiments, the length of the antisense oligonucleotide of the present disclosure is 10 to 50 bases. In one or more embodiments, the length of the antisense oligonucleotide of the present disclosure is 11 bases or more, 12 bases or more, 13 bases or more, 14 bases or more, or 15 bases or more. In one or more embodiments, the length of the antisense oligonucleotide of the present disclosure is 45 bases or less, 40 bases or less, 39 bases or less, 38 bases or less, 37 bases or less, 36 bases or less, 35 bases or less, 34 bases or less, 33 bases or less, 32 bases or less, 30 bases or less, 29 bases or less, 28 bases or less, 27 bases or less, 26 bases or less, or 25 bases or less.

[0022] The antisense oligonucleotide of the present disclosure has a base sequence capable of binding to a sequence including a branch point that serves as a starting point of pseudo-exon-type aberrant splicing. In one or more embodiments, the antisense oligonucleotide of the present disclosure may include a base capable of binding to the above-described branch point, and there is no particular limitation on the position of the base capable of binding to the branch point. In one or more embodiments, the base capable of binding to the branch point may be the second base, third base, fourth base, fifth base, sixth base, or any subsequent base from the 5′end of the antisense oligonucleotide of the present disclosure. In one or more embodiments, the base capable of binding to the branch point may be the second base, third base, fourth base, fifth base, sixth base, or any subsequent base from the 3′end of the antisense oligonucleotide of the present disclosure.

[0023] In one or more embodiments, the antisense oligonucleotide of the present disclosure can reduce and/or suppress the occurrence of recognition of a non-coding region as a pseudo-exon by binding to the sequence including the branch point, thereby correcting pseudo-exon-type aberrant splicing and thus allowing normal splicing. In one or more embodiments, the antisense oligonucleotide of the present disclosure can suppress aberrant splicing involving pseudo-exon formation with an efficiency of 10% or more, 20% or more, 30% or more, 40% or more, 50% or more, 60% or more, 70% or more, 80% or more, or 90% or more.

[0024] In the present disclosure, “correcting or suppressing pseudo-exon-type aberrant splicing” means that, in one or more embodiments, in a patient having a disease caused by pseudo-exon-type aberrant splicing, the expression level of aberrant mRNA and/or the expression level of aberrant transcripts produced by the pseudo-exon-type aberrant splicing is suppressed. Suppression of the expression level means, in one or more embodiments, the expression level is reduced by 20% or more, 25% or more, 30% or more, 40% or more, 45% or more, or 50% or more, as compared with the expression level before administering the antisense oligonucleotide of the present disclosure.

[0025] In the present disclosure, “increasing the production of correctly spliced transcripts” means that, in one or more embodiments, in a patient having a disease caused by pseudo-exon-type aberrant splicing or in a sample (specimen) derived from the patient, the amount of production (expression level) of the correctly spliced transcripts is increased by 20% or more, 25% or more, 30% or more, 40% or more, 45% or more, or 50% or more, as compared with the expression level before administering the antisense oligonucleotide of the present disclosure. In one or more embodiments, examples of the sample (specimen) derived from the patient include cells, tissue, and organs collected from the patient.

[0026] In one or more embodiments, examples of the pseudo-exon-type aberrant splicing in the present disclosure include pseudo-exon-type splicing defects observed in genetic diseases, cancers, etc.

[0027] In one or more embodiments, examples of the disease caused by pseudo-exon-type aberrant splicing include: Stargardt disease, ABCA4; hyperinsulinemic hypoglycemia, familial, ABCC8, HADH; familial adenomatous polyposis, APC ataxia telangiectasia, ATM; breast-ovarian cancer, familial, BRCA1, BRCA2; breast cancer, early-onset, susceptibility to, BRIP1; Leber congenital amaurosis, CEP290, RPGRIP1; cystic fibrosis, CFTR; Usher syndrome, CLRN1, USH2A; achromatopsia, CNGB3; Ullrich congenital muscular dystrophy, COL6A1; muscular dystrophy, limb-girdle, autosomal recessive, DYSF; Fukuyama congenital muscular dystrophy, FKTN; Pompe disease, GAA; galactosemia, GALT; Laron dwarfism, GHR; Fabry disease, GLA; beta-thalassemia, EBB; hypercholesterolemia, familial, LDLR; familial hypertrophic cardiomyopathy, MYBPC3; autosomal recessive polycystic kidney disease, PKHD1; Gitelman syndrome, SLC12A3; and Werner syndrome, WRN (Alphanumeric characters following each disease name indicate the causative gene(s) for the disease).

[0028] Examples of the mutation causing pseudo-exon-type splicing defects include, in one or more embodiments, mutations in the causative genes for the above-described diseases. Examples of the causative genes for the above-described diseases include, in one or more embodiments, the ABCA4 gene, ABCC8 gene, APC gene, ATM gene, BRCA1 gene, BRCA2 gene, BRIP1 gene, CEP290 gene, CFTR gene, CLRN1 gene, CNGB3 gene, COL6A1 gene, DYSF gene, FKTN gene, GAA gene, GALT gene, GHR gene, GLA gene, HADH gene, EBB gene, LDLR gene, MYBPC3 gene, PKHD1 gene, RPGRIP1 gene, SLC12A3 gene, USH2A gene, and WRN gene.

[0029] In one or more embodiments, mutations causing the pseudo-exon-type splicing defects include the following mutations (variants) in the above-described genes. In one or more embodiments, the antisense oligonucleotide of the present disclosure has activity capable of suppressing and/or correcting pseudo-exon-type aberrant splicing caused by the following mutations (variants) in the above-described genes. In one or more embodiments, whether the pseudo-exon-type aberrant splicing is suppressed and/or corrected can be determined by examining the base sequences of splicing products (transcripts). The following mutations are represented according to the notation system established by the Human Genome Variation Society with respect to base sequences identified by Accession IDs in the RefSeq database (NCBI Reference Sequence Database, https://wwwncbi.nhm.nih.gov/refseq/) provided by NCBI (National Center for Biotechnology Information, https://wwwncbi.nlm.nih.gov/) in the United States.
[0030] NC_000001.11:g.94084225G>Amutation in theABCA4 gene;
[0031] NC_000001.11:g.94081224C>G mutation in the ABCA4 gene;
[0032] NC_000001.11:g.94062142G>C mutation in the ABCA4 gene;
[0033] NC_000001.11:g.94028345T>C mutation in theABCA4 gene;
[0034] NC_000001.11:g.94027444C>T mutation in theABCA4 gene;
[0035] NC_000011.11:g.17444325T>C mutation in theABCC8 gene;
[0036] NC_000005.11:g.112790640T>G mutation in the APC gene;
[0037] NC_000005.11:g.112822720A>G mutation in the APC gene;
[0038] NC_000005.11:g.112822722C>T mutation in the APC gene;
[0039] NC_000005.11:g.112822726A>T mutation in the APC gene;
[0040] NC_000005.11:g.112822734G>A mutation in the APC gene;
[0041] NC_000005.11:g.112779849G>A mutation in the APC gene;
[0042] NC_000011.11:g.108270483_108270486del mutation in the ATM gene;
[0043] NC_000011.11:g.108309110A>G mutation in the ATM gene;
[0044] NC_000017.11:g.43086839G>Amutation in the BRCA1 gene;
[0045] NC_000013.11:g.32345247T>G mutation in the BRCA2 gene;
[0046] NC_000017.11:g.61781503T>A mutation in the BRIP1 gene;
[0047] NC_000012.11:g.88101183T>C mutation in the CEP290 gene;
[0048] NC_000007.11:g.117578327A>G mutation in the CFTR gene;
[0049] NC_000007.11:g.117589467A>G mutation in the CFTR gene;
[0050] NC_000007.11:g.117639961C>T mutation in the CFTR gene;
[0051] NC_000003.11:g.150942410A>C mutation in the CLRN1 gene;
[0052] NC_000008.11:g.86605416C>T mutation in the CNGB3 gene;
[0053] NC_000021.11:g.45989967C>T mutation in the COL6A1 gene;
[0054] NC_000002.11:g.71661900G>T mutation in the DYSF gene;
[0055] NC_000009.11:g.105606576G>T mutation in the FKTN gene;
[0056] NC_000017.11:g.80104542T>G mutation in the GAA gene;
[0057] NC_000009.11:g.34649954A>G mutation in the GALT gene;
[0058] NC_000005.11:g.42700794A>G mutation in the GHR gene;
[0059] NC_000023.11:g.101399747C>T mutation in the GLA gene;
[0060] NC_000004.11:g.108023948A>G mutation in the HADH gene;
[0061] NC_000011.11:g.5225872A>C mutation in the EBB gene;
[0062] NC_000011.11:g.5225832G>C mutation in the HBB gene;
[0063] NC_000011.11:g.5225923G>Amutation in the EBB gene;
[0064] NC_000019.11:g.11120625G>T mutation in the LDLR gene;
[0065] NC_000019.11:g.11122956G>A mutation in the LDLR gene;
[0066] NC_000011.11:g.47343314C>T mutation in the MYBPC3 gene;
[0067] NC_000006.11:g.51882440T>C mutation in the PKHD1 gene;
[0068] NC_000014.11:g.21321131T>G mutation in the RPGRIP1 gene;
[0069] NC_000016.11:g.56883858C>T mutation in the SLC12A3 gene;
[0070] NC_000016.11:g.56893307C>T mutation in the SLC12A3 gene;
[0071] NC_000001.11:g.215891198T>C mutation in the USH2A gene;
[0072] NC_000001.11:g.215794441T>C mutation in the USH2A gene; and
[0073] NC_000008.11:g.31108591A>G mutation in the WRN gene.

[0074] FIG. 1 shows the names of diseases that can be target diseases of the antisense oligonucleotide of the present disclosure, as well as causative genes, mutations, ClinVar registration numbers, dbSNP registration numbers, and examples of branch points corresponding to the respective diseases. In one or more embodiments, the antisense oligonucleotide of the present disclosure is capable of correcting pseudo-exon-type aberrant splicing that can occur in patients having the diseases shown in FIG. 1 (pseudo-exon-type aberrant splicing in the genes listed in FIG. 1).

[0075] SEQ ID NO: 1 is the base sequence of the ABCA4 gene, and represents the reverse complement of the base sequence consisting of 93992834th to 94121148th bases in the base sequence of human chromosome 1 in a GRCh38/hg38 human reference genome list (NC_000001.11 (93992834.94121148, complement)).

[0076] SEQ ID NO: 2 is the base sequence of the ABCC8 gene, and represents the reverse complement of the base sequence consisting of 17392498th to 17476845th bases in the base sequence of human chromosome 11 in the GRCh38/hg38 human reference genome list (NC_000011.10 (17392498.17476845, complement)).

[0077] SEQ ID NO: 3 is the base sequence of the APC gene, and represents the base sequence consisting of 112707498th to 112846239th bases in the base sequence of human chromosome 5 in the GRCh38/hg38 human reference genome list (NC_000005.10 (112707498.112846239)).

[0078] SEQ ID NO: 4 is the base sequence of the ATM gene, and represents the base sequence consisting of 108223067th to 108369102nd bases in the base sequence of human chromosome 11 in the GRCh38/hg38 human reference genome list (NC_000011.10 (108223067.108369102)).

[0079] SEQ ID NO: 5 is the base sequence of the BRCA1 gene, and represents the reverse complement of the base sequence consisting of 43044295th to 43125364th bases in the base sequence of human chromosome 17 in the GRCh38/hg38 human reference genome list (NC_000017.11 (43044295.43125364, complement)).

[0080] SEQ ID NO: 6 is the base sequence of the BRCA2 gene, and represents the base sequence consisting of 32315508th to 32400268th bases in the base sequence of human chromosome 13 in the GRCh38/hg38 human reference genome list (NC_000013.11 (32315508.32400268)).

[0081] SEQ ID NO: 7 is the base sequence of the BRIP1 gene, and represents the reverse complement of the base sequence consisting of 61/679,139th to 61/863,528th bases in the base sequence of human chromosome 17 in the GRCh38/hg38 human reference genome list (NC_000017.11 (61679139.61863528, complement)).

[0082] SEQ ID NO: 8 is the base sequence of the CEP290 gene, and represents the reverse complement of the base sequence consisting of88049016th to 88142088th bases in the base sequence of human chromosome 12 in the GRCh38/hg38 human reference genome list (NC_000012.12 (88049016.88142088, complement)).

[0083] SEQ ID NO: 9 is the base sequence of the CFTR gene, and represents the base sequence consisting of 117480025th to 117668665th bases in the base sequence of human chromosome 7 in the GRCh38/hg38 human reference genome list (NC_000007.14 (117480025.117668665)).

[0084] SEQ ID NO: 10 is the base sequence of the CLRN1 gene, and represents the reverse complement of the base sequence consisting of 150926163rd to 150972999th bases in the base sequence of human chromosome 3 in the GRCh38/hg38 human reference genome list (NC_000003.12 (150926163.150972999, complement)).

[0085] SEQ ID NO: 11 is the base sequence of the CNGB3 gene, and represents the reverse complement of the base sequence consisting of86574179th to 86743634th bases in the base sequence of human chromosome 8 in the GRCh38/hg38 human reference genome list (NC_000008.11 (86574179.86743634, complement)).

[0086] SEQ ID NO: 12 is the base sequence of the COL6A1 gene, and represents the base sequence consisting of 45981770th to 46005048th bases in the base sequence of human chromosome 21 in the GRCh38/hg38 human reference genome list (NC_000021.9 (45981770.46005048)).

[0087] SEQ ID NO: 13 is the base sequence of the DYSF gene, and represents the base sequence consisting of 71453561st to 71686763rd bases in the base sequence of human chromosome 2 in the GRCh38/hg38 human reference genome list (NC_000002.12 (71453561.71686763)).

[0088] SEQ ID NO: 14 is the base sequence of the FKTN gene, and represents the base sequence consisting of 105558130th to 105641118th bases in the base sequence of human chromosome 9 in the GRCh38/hg38 human reference genome list (NC_000009.12 (105558130.105641118)).

[0089] SEQ ID NO: 15 is the base sequence of the GAA gene, and represents the base sequence consisting of80101581st to 80119881st bases in the base sequence of human chromosome 17 in the GRCh38/hg38 human reference genome list (NC_000017.11 (80101581.80119881)).

[0090] SEQ ID NO: 16 is the base sequence of the GALT gene, and represents the base sequence consisting of 34646675th to 34651035th bases in the base sequence of human chromosome 9 in the GRCh38/hg38 human reference genome list (NC_000009.12 (34646675.34651035)).

[0091] SEQ ID NO: 17 is the base sequence of the GHR gene, and represents the base sequence consisting of 42423439th to 42721878th bases in the base sequence of human chromosome 5 in the GRCh38/hg38 human reference genome list (NC_000005.10 (42423439.42721878)).

[0092] SEQ ID NO: 18 is the base sequence of the GLA gene, and represents the reverse complement of the base sequence consisting of 101397803rd to 101407925th bases in the base sequence of human chromosome X in the GRCh38/hg38 human reference genome list (NC_000023.11 (101397803.101407925, complement)).

[0093] SEQ ID NO: 19 is the base sequence of the HADH gene, and represents the base sequence consisting of 107989889th to 108035171st bases in the base sequence of human chromosome 4 in the GRCh38/hg38 human reference genome list (NC_000004.12 (107989889.108035171)).

[0094] SEQ ID NO: 20 is the base sequence of the HBB gene, and represents the reverse complement of the base sequence consisting of 5225464th to 5227071st bases in the base sequence of human chromosome 11 in the GRCh38/hg38 human reference genome list (NC_000011.10 (5225464.5227071, complement)).

[0095] SEQ ID NO: 21 is the base sequence of the LDLR gene, and represents the base sequence consisting of 11089463rd to 11133820th bases in the base sequence of human chromosome 19 in the GRCh38/hg38 human reference genome list (NC_000019.10 (11089463.11133820)).

[0096] SEQ ID NO: 22 is the base sequence of the MYBPC3 gene, and represents the reverse complement of the base sequence consisting of 47331406th to 47352702nd bases in the base sequence of human chromosome 11 in the GRCh38/hg38 human reference genome list (NC_000011.10 (47331406.47352702, complement)).

[0097] SEQ ID NO: 23 is the base sequence of the PKHD1 gene, and represents the reverse complement of the base sequence consisting of 51615299th to 52087615th bases in the base sequence of human chromosome 6 in the GRCh38/hg38 human reference genome list (NC_000006.12 (51615299.52087615, complement)).

[0098] SEQ ID NO: 24 is the base sequence of the RPGRIP1 gene, and represents the base sequence consisting of 21280083rd to 21351301st bases in the base sequence of human chromosome 14 in the GRCh38/hg38 human reference genome list (NC_000014.9 (21280083.21351301)).

[0099] SEQ ID NO: 25 is the base sequence of the SLC12A3 gene, and represents the base sequence consisting of 56865207th to 56915850th bases in the base sequence of human chromosome 16 in the GRCh38/hg38 human reference genome list (NC_000016.10 (56865207.56915850)).

[0100] SEQ ID NO: 26 is the base sequence of the USH2A gene, and represents the reverse complement of the base sequence consisting of 215622891st to 216423448th bases in the base sequence of human chromosome 1 in the GRCh38/hg38 human reference genome list (NC_000001.11 (215622891.216423448, complement)).

[0101] SEQ ID NO: 27 is the base sequence of the WRN gene, and represents the base sequence consisting of 31033810th to 31176138th bases in the base sequence of human chromosome 8 in the GRCh38/hg38 human reference genome list (NC_000008.11 (31033810.31176138)).

[0102] In the present disclosure, “GRCh38/hg38” refers to an assembly of human genome data (RefSeq assembly accession: GRCh38.p14 (GCF_000001405.40)) registered in https://www.ncbi.nhm.nih.gov/and the like.

[0103] In one or more embodiments, the branch point in the present disclosure is an adenine base located in a region from 10 to 120 bases upstream of the 3′-splice site of an intron. In one or more embodiments, the region where the adenine base as the branch point is present may be a region from 11, 12, 13, 14, 15, 16, 17, 18, 19, 20, or 21 bases to 35, 40, 41, 42, 43, 44, 45, 50, 55, 65, 70, 80, 90, or 100 bases upstream of the 3′-splice site of the intron.

[0104] In one or more embodiments, the branch point can be predicted using SVM-BP finder (http://regulatorygenomics.udf.edu/Software/SVM_BP/).

[0105] In one or more embodiments, the branch point in the present disclosure may be an adenine base present in a region where branch points that may be involved in pseudo-exon-type aberrant splicing in the above-described causative genes (regions (1) to (40) to be described below: base sequences represented by SEQ ID NOs: 28 to 67). In one or more embodiments, examples of the branch point of the present disclosure include adenine bases to be described below. In the following table column entitled “Location in GRCh38/hg38 human reference genome”, “chr**” indicates the chromosomal location.

TABLE 1
The branch point that can be involved in pseudo-exon-
type aberrant splicing caused by the mutation (chr1:
94084225G > A) in the ABCA4 gene (SEQ ID NO: 1):

| | Location in the | Location in |
|---|---|---|
| Location in GRCh38/hg38 | causative gene | the regen |
| human reference genome | (SEQ ID NO: 1) | (SEQ ID NO: 28) |
| chr1: 94084303 | 36846 | 37 |
| chr1: 94084298 | 36851 | 42 |
| chr1: 94084288 | 36861 | 52 |
| chr1: 94084274 | 36875 | 66 |
| chr1: 94084253 | 36896 | 87 |
| chr1: 94084247 | 36902 | 93 |
| chr1: 94084240 | 36909 | 100 |

The branch point that can be involved in pseudo-exon-
type aberrant splicing caused by the mutation (chr1:
94081224C > G) in the ABCA4 gene (SEQ ID NO: 1):

| | Location in the | Location in |
|---|---|---|
| Location in GRCh38/hg38 | causative gene | the regen |
| human reference genome | (SEQ ID NO: 1) | (SEQ ID NO: 29) |
| chr1: 94081310 | 39839 | 32 |
| chr1: 94081305 | 39844 | 37 |
| chr1: 94081259 | 39890 | 83 |
| chr1: 94081251 | 39898 | 91 |

The branch point that can be involved in pseudo-exon-
type aberrant splicing caused by the mutation (chr1:
94062142G > C) in the ABCA4 gene (SEQ ID NO: 1):

| | Location in the | Location in |
|---|---|---|
| Location in GRCh38/hg38 | causative gene | the regen |
| human reference genome | (SEQ ID NO: 1) | (SEQ ID NO: 30) |
| chr1: 94062241 | 58908 | 61 |
| chr1: 94062224 | 58925 | 78 |
| chr1: 94062213 | 58936 | 89 |
| chr1: 94062206 | 58943 | 96 |

The branch point that can be involved in pseudo-exon-
type aberrant splicing caused by the mutation (chr1:
94028345T > C) in the ABCA4 gene (SEQ ID NO: 1):

| | Location in the | Location in |
|---|---|---|
| Location in GRCh38/hg38 | causative gene | the regen |
| human reference genome | (SEQ ID NO: 1) | (SEQ ID NO: 31) |
| chr1: 94028507 | 92642 | 26 |
| chr1: 94028506 | 92643 | 27 |
| chr1: 94028498 | 92651 | 35 |
| chr1: 94028497 | 92652 | 36 |
| chr1: 94028494 | 92655 | 39 |
| chr1: 94028493 | 92656 | 40 |
| chr1: 94028466 | 92683 | 67 |

The branch point that can be involved in pseudo-exon-
type aberrant splicing caused by the mutation (chr1:
94028345T > C) in the ABCA4 gene (SEQ ID NO: 1):

| | Location in the | Location in |
|---|---|---|
| Location in GRCh38/hg38 | causative gene | the regen |
| human reference genome | (SEQ ID NO: 1) | (SEQ ID NO: 32) |
| chr1: 94028544 | 92605 | 33 |
| chr1: 94028534 | 92615 | 43 |
| chr1: 94028518 | 92631 | 59 |
| chr1: 94028510 | 92639 | 67 |
| chr1: 94028507 | 92642 | 70 |
| chr1: 94028506 | 92643 | 71 |
| chr1: 94028498 | 92651 | 79 |
| chr1: 94028497 | 92652 | 80 |
| chr1: 94028494 | 92655 | 83 |
| chr1: 94028493 | 92656 | 84 |

The branch point that can be involved in pseudo-exon-
type aberrant splicing caused by the mutation (chr1:
94027444C > T) in the ABCA4 gene (SEQ ID NO: 1):

| | Location in the | Location in |
|---|---|---|
| Location in GRCh38/hg38 | causative gene | the regen |
| human reference genome | (SEQ ID NO: 1) | (SEQ ID NO: 33) |
| chr1: 94027614 | 93535 | 61 |
| chr1: 94027606 | 93543 | 69 |
| chr1: 94027592 | 93557 | 83 |
| chr1: 94027583 | 93566 | 92 |

The branch point that can be involved in pseudo-exon-
type aberrant splicing caused by the mutation (chr11:
17444325T > C) in the ABCC8 gene (SEQ ID NO: 2):

| | Location in the | Location in |
|---|---|---|
| Location in GRCh38/hg38 | causative gene | the regen |
| human reference genome | (SEQ ID NO: 2) | (SEQ ID NO: 34) |
| chr11: 17444455 | 32391 | 67 |
| chr11: 17444440 | 32406 | 82 |
| chr11: 17444436 | 32410 | 86 |

The branch point that can be involved in pseudo-exon-
type aberrant splicing caused by the mutation (chr5:
112790640T > C) in the APC gene (SEQ ID NO: 3):

| | Location in the | Location in |
|---|---|---|
| Location in GRCh38/hg38 | causative gene | the regen |
| human reference genome | (SEQ ID NO: 3) | (SEQ ID NO: 35) |
| chr5: 112790443 | 82946 | 51 |
| chr5: 112790465 | 82968 | 73 |
| chr5: 112790478 | 82981 | 86 |
| chr5: 112790493 | 82996 | 101 |

The branch point that can be involved in pseudo-exon-
type aberrant splicing caused by the mutation (chr5:
112822720A > G, chr5: 112822722C > T, chr5: 112822726A >
T, or chr5: 112822734G > A) in the APC gene (SEQ ID NO: 3):

| | Location in the | Location in |
|---|---|---|
| Location in GRCh38/hg38 | causative gene | the regen |
| human reference genome | (SEQ ID NO: 3) | (SEQ ID NO: 36) |
| chr5: 112822544 | 115047 | 27 |
| chr5: 112822547 | 115050 | 30 |
| chr5: 112822555 | 115058 | 38 |
| chr5: 112822569 | 115072 | 52 |
| chr5: 112822577 | 115080 | 60 |
| chr5: 112822583 | 115086 | 66 |
| chr5: 112822588 | 115091 | 71 |
| chr5: 112822611 | 115114 | 94 |
| chr5: 112822616 | 115119 | 99 |

The branch point that can be involved in pseudo-exon-
type aberrant splicing caused by the mutation (chr5:
112779849G > A) in the APC gene (SEQ ID NO: 3):

| | Location in the | Location in |
|---|---|---|
| Location in GRCh38/hg38 | causative gene | the regen |
| human reference genome | (SEQ ID NO: 3) | (SEQ ID NO: 37) |
| chr5: 112779603 | 72106 | 40 |
| chr5: 112779606 | 72109 | 43 |
| chr5: 112779614 | 72117 | 51 |
| chr5: 112779618 | 72121 | 55 |
| chr5: 112779626 | 72129 | 63 |
| chr5: 112779633 | 72136 | 70 |
| chr5: 112779642 | 72145 | 79 |
| chr5: 112779660 | 72163 | 97 |
| chr5: 112779666 | 72169 | 103 |

The branch point that can be involved in pseudo-exon-
type aberrant splicing caused by the mutation (chr11:
108270483_108270486del) in the ATM gene (SEQ ID NO: 4):

| | Location in the | Location in |
|---|---|---|
| Location in GRCh38/hg38 | causative gene | the regen |
| human reference genome | (SEQ ID NO: 4) | (SEQ ID NO: 38) |
| chr11: 108270378 | 47312 | 28 |
| chr11: 108270386 | 47320 | 36 |
| chr11: 108270387 | 47321 | 37 |
| chr11: 108270402 | 47336 | 52 |
| chr11: 108270405 | 47339 | 55 |
| chr11: 108270408 | 47342 | 58 |
| chr11: 108270411 | 47345 | 61 |
| chr11: 108270415 | 47349 | 65 |
| chr11: 108270419 | 47353 | 69 |
| chr11: 108270445 | 47379 | 95 |
| chr11: 108270451 | 47385 | 101 |

The branch point that can be involved in pseudo-exon-
type aberrant splicing caused by the mutation (chr11:
108309110A > G) in the ATM gene (SEQ ID NO: 4):

| | Location in the | Location in |
|---|---|---|
| Location in GRCh38/hg38 | causative gene | the regen |
| human reference genome | (SEQ ID NO: 4) | (SEQ ID NO: 39) |
| chr11: 108308880 | 85814 | 32 |
| chr11: 108308892 | 85826 | 44 |
| chr11: 108308901 | 85835 | 53 |
| chr11: 108308902 | 85836 | 54 |
| chr11: 108308947 | 85881 | 99 |
| chr11: 108308954 | 85888 | 106 |

The branch point that can be involved in pseudo-exon-
type aberrant splicing caused by the mutation (chr17:
43086839G > A) in the BRCA1 gene (SEQ ID NO: 5):

| | Location in the | Location in |
|---|---|---|
| Location in GRCh38/hg38 | causative gene | the regen |
| human reference genome | (SEQ ID NO: 5) | (SEQ ID NO: 40) |
| chr17: 43087041 | 38324 | 34 |
| chr17: 43087029 | 38336 | 46 |
| chr17: 43087028 | 38337 | 47 |
| chr17: 43087021 | 38344 | 54 |
| chr17: 43087004 | 88361 | 71 |
| chr17: 43086992 | 38373 | 83 |
| chr17: 43086981 | 38384 | 94 |

The branch point that can be involved in pseudo-exon-
type aberrant splicing caused by the mutation (chr13:
32345247T > G) in the BRCA2 gene (SEQ ID NO: 6):

| | Location in the | Location in |
|---|---|---|
| Location in GRCh38/hg38 | causative gene | the regen |
| human reference genome | (SEQ ID NO: 6) | (SEQ ID NO: 41) |
| chr13: 32345085 | 29578 | 58 |
| chr13: 32345091 | 29584 | 64 |
| chr13: 32345096 | 29589 | 69 |
| chr13: 32345104 | 29597 | 77 |
| chr13: 32345122 | 29615 | 95 |
| chr13: 32345131 | 29624 | 104 |

The branch point that can be involved in pseudo-exon-
type aberrant splicing caused by the mutation (chr17:
61781503T > A) in the BRIP1 gene (SEQ ID NO: 7):

| | Location in the | Location in |
|---|---|---|
| Location in GRCh38/hg38 | causative gene | the regen |
| human reference genome | (SEQ ID NO: 7) | (SEQ ID NO: 42) |
| chr17: 61782558 | 80971 | 30 |
| chr17: 61782554 | 80975 | 34 |
| chr17: 61782541 | 80988 | 47 |
| chr17: 61782524 | 81005 | 64 |
| chr17: 61782523 | 81006 | 65 |
| chr17: 61782514 | 81015 | 74 |
| chr17: 61782503 | 81026 | 85 |

The branch point that can be involved in pseudo-exon-
type aberrant splicing caused by the mutation (chr12:
88101183T > C) in the CEP290 gene (SEQ ID NO: 8):

| | Location in the | Location in |
|---|---|---|
| Location in GRCh38/hg38 | causative gene | the regen |
| human reference genome | (SEQ ID NO: 8) | (SEQ ID NO: 43) |
| chr12: 88101399 | 40690 | 37 |
| chr12: 88101381 | 40708 | 55 |
| chr12: 88101372 | 40717 | 64 |
| chr12: 88101343 | 40746 | 93 |
| chr12: 88101332 | 40757 | 104 |

The branch point that can be involved in pseudo-exon-
type aberrant splicing caused by the mutation (chr7:
117578327A > G) in the CFTR gene (SEQ ID NO: 9):

| | Location in the | Location in |
|---|---|---|
| Location in GRCh38/hg38 | causative gene | the regen |
| human reference genome | (SEQ ID NO: 9) | (SEQ ID NO: 44) |
| chr7: 117578130 | 98106 | 32 |
| chr7: 117578142 | 98118 | 44 |
| chr7: 117578149 | 98125 | 51 |
| chr7: 117578164 | 98140 | 66 |
| chr7: 117578182 | 98158 | 84 |

The branch point that can be involved in pseudo-exon-
type aberrant splicing caused by the mutation (chr7:
117589467A > G) in the CFTR gene (SEQ ID NO: 9):

| | Location in the | Location in |
|---|---|---|
| Location in GRCh38/hg38 | causative gene | the regen |
| human reference genome | (SEQ ID NO: 9) | (SEQ ID NO: 45) |
| chr7: 117589329 | 109305 | 32 |
| chr7: 117589330 | 109306 | 33 |
| chr7: 117589350 | 109326 | 53 |
| chr7: 117589351 | 109327 | 54 |
| chr7: 117589362 | 109338 | 65 |
| chr7: 117589363 | 109339 | 66 |
| chr7: 117589373 | 109349 | 76 |
| chr7: 117589374 | 109350 | 77 |
| chr7: 117589384 | 109360 | 87 |
| chr7: 117589385 | 109361 | 88 |
| chr7: 117589396 | 109372 | 99 |

The branch point that can be involved in pseudo-exon-
type aberrant splicing caused by the mutation (chr7:
117639961C > T) in the CFTR gene (SEQ ID NO: 9):

| | Location in the | Location in |
|---|---|---|
| Location in GRCh38/hg38 | causative gene | the regen |
| human reference genome | (SEQ ID NO: 9) | (SEQ ID NO: 46) |
| chr7: 117639791 | 159767 | 36 |
| chr7: 117639804 | 159780 | 49 |
| chr7: 117639807 | 159783 | 52 |
| chr7: 117639808 | 159784 | 53 |
| chr7: 117639811 | 159787 | 56 |
| chr7: 117639814 | 159790 | 59 |
| chr7: 117639815 | 159791 | 60 |
| chr7: 117639828 | 159804 | 73 |
| chr7: 117639836 | 159812 | 81 |
| chr7: 117639844 | 159820 | 89 |
| chr7: 117639848 | 159824 | 93 |
| chr7: 117639851 | 159827 | 96 |
| chr7: 117639854 | 159830 | 99 |

The branch point that can be involved in pseudo-exon-
type aberrant splicing caused by the mutation (chr3:
150942410A > C) in the CLRN1 gene (SEQ ID NO: 10):

| | Location in the | Location in |
|---|---|---|
| Location in GRCh38/hg38 | causative gene | the regen |
| human reference genome | (SEQ ID NO: 10) | (SEQ ID NO: 47) |
| chr3: 150942716 | 30284 | 44 |
| chr3: 150942694 | 30306 | 66 |
| chr3: 150942687 | 30313 | 73 |
| chr3: 150942681 | 30319 | 79 |
| chr3: 150942661 | 30339 | 99 |

The branch point that can be involved in pseudo-exon-
type aberrant splicing caused by the mutation (chr8:
86605416C > T) in the CNGB3 gene (SEQ ID NO: 11):

| | Location in the | Location in |
|---|---|---|
| Location in GRCh38/hg38 | causative gene | the regen |
| human reference genome | (SEQ ID NO: 11) | (SEQ ID NO: 48) |
| chr8: 86605542 | 138093 | 32 |
| chr8: 86605541 | 138094 | 33 |
| chr8: 86605538 | 138097 | 36 |
| chr8: 86605528 | 138107 | 46 |
| chr8: 86605525 | 138110 | 49 |
| chr8: 86606524 | 138111 | 50 |
| chr8: 86605520 | 138115 | 54 |
| chr8: 86605515 | 138120 | 59 |
| chr8: 86605499 | 138136 | 75 |
| chr8: 86605490 | 138145 | 84 |
| chr8: 86605486 | 138149 | 88 |
| chr8: 86605481 | 138154 | 93 |
| chr8: 86605473 | 138162 | 101 |
| chr8: 86605472 | 138163 | 102 |

The branch point that can be involved in pseudo-exon-
type aberrant splicing caused by the mutation (chr21:
45989967C > T) in the COL6A1 gene (SEQ ID NO: 12):

| | Location in the | Location in |
|---|---|---|
| Location in GRCh38/hg38 | causative gene | the regen |
| human reference genome | (SEQ ID NO: 12) | (SEQ ID NO: 49) |
| chr21: 45989856 | 8087 | 83 |
| chr21: 45989871 | 8102 | 98 |

The branch point that can be involved in pseudo-exon-
type aberrant splicing caused by the mutation (chr2:
71661900G > T) in the DYSF gene (SEQ ID NO: 13):

| | Location in the | Location in |
|---|---|---|
| Location in GRCh38/hg38 | causative gene | the regen |
| human reference genome | (SEQ ID NO: 13) | (SEQ ID NO: 50) |
| chr2: 71661637 | 208077 | 36 |
| chr2: 71661655 | 208095 | 54 |
| chr2: 71661664 | 208104 | 63 |

The branch point that can be involved in pseudo-exon-
type aberrant splicing caused by the mutation (chr9:
105606576G > T) in the FKTN gene (SEQ ID NO: 14):

| | Location in the | Location in |
|---|---|---|
| Location in GRCh38/hg38 | causative gene | the regen |
| human reference genome | (SEQ ID NO: 14) | (SEQ ID NO: 51) |
| chr9: 105606413 | 48284 | 27 |
| chr9: 105606414 | 48285 | 28 |
| chr9: 105606420 | 48291 | 34 |
| chr9: 105606428 | 48299 | 42 |
| chr9: 105606429 | 48300 | 43 |
| chr9: 105606441 | 48312 | 55 |
| chr9: 105606446 | 48317 | 60 |
| chr9: 105606460 | 48331 | 74 |
| chr9: 105606469 | 48340 | 83 |
| chr9: 105606488 | 48359 | 102 |

The branch point that can be involved in pseudo-exon-
type aberrant splicing caused by the mutation (chr17:
80104542T > G) in the GAA gene (SEQ ID NO: 15):

| | Location in the | Location in |
|---|---|---|
| Location in GRCh38/hg38 | causative gene | the regen |
| human reference genome | (SEQ ID NO: 15) | (SEQ ID NO: 52) |
| chr17: 80104315 | 2735 | 35 |
| chr17: 80104322 | 2742 | 42 |
| chr17: 80104329 | 2749 | 49 |

The branch point that can be involved in pseudo-exon-
type aberrant splicing caused by the mutation (chr9:
34649954A > G) in the GALT gene (SEQ ID NO: 16):

| | Location in the | Location in |
|---|---|---|
| Location in GRCh38/hg38 | causative gene | the regen |
| human reference genome | (SEQ ID NO: 16) | (SEQ ID NO: 53) |
| chr9: 34649864 | 3190 | 30 |
| chr9: 34649874 | 3200 | 40 |
| chr9: 34649877 | 3203 | 43 |
| chr9: 34649886 | 3212 | 52 |
| chr9: 34649926 | 3252 | 92 |
| chr9: 34649933 | 3259 | 99 |
| chr9: 34649939 | 3265 | 105 |

The branch point that can be involved in pseudo-exon-
type aberrant splicing caused by the mutation (chr5:
42700794A > G) in the GHR gene (SEQ ID NO: 17):

| | Location in the | Location in |
|---|---|---|
| Location in GRCh38/hg38 | causative gene | the regen |
| human reference genome | (SEQ ID NO: 17) | (SEQ ID NO: 54) |
| chr5: 42700599 | 277161 | 33 |
| chr5: 42700602 | 277164 | 36 |
| chr5: 42700608 | 277170 | 42 |
| chr5: 42700620 | 277182 | 54 |
| chr5: 42700643 | 277205 | 77 |
| chr5: 42700660 | 277222 | 94 |
| chr5: 42700664 | 277226 | 98 |
| chr5: 42700670 | 277232 | 104 |

The branch point that can be involved in pseudo-exon-
type aberrant splicing caused by the mutation (chrX:
101399747C > T) in the GLA gene (SEQ ID NO: 18):

| | Location in the | Location in |
|---|---|---|
| Location in GRCh38/hg38 | causative gene | the regen |
| human reference genome | (SEQ ID NO: 18) | (SEQ ID NO: 55) |
| chrX: 101399867 | 8059 | 54 |
| chrX: 101399859 | 8067 | 62 |
| chrX: 101399858 | 8068 | 63 |
| chrX: 101399838 | 8088 | 83 |
| chrX: 101399831 | 8095 | 90 |
| chrX: 101399828 | 8098 | 93 |
| chrX: 101399823 | 8103 | 98 |
| chrX: 101399822 | 8104 | 99 |
| chrX: 101399814 | 8112 | 107 |

The branch point that can be involved in pseudo-exon-
type aberrant splicing caused by the mutation (chr4:
108023948A > G) in the HADH gene (SEQ ID NO: 19):

| | Location in the | Location in |
|---|---|---|
| Location in GRCh38/hg38 | causative gene | the regen |
| human reference genome | (SEQ ID NO: 19) | (SEQ ID NO: 56) |
| chr4: 108023860 | 33972 | 32 |
| chr4: 108023863 | 33975 | 35 |
| chr4: 108023878 | 33990 | 50 |
| chr4: 108023881 | 33993 | 53 |
| chr4: 108023885 | 33997 | 57 |
| chr4: 108023890 | 34002 | 62 |
| chr4: 108023905 | 34017 | 77 |
| chr4: 108023921 | 34033 | 93 |
| chr4: 108023931 | 34043 | 103 |

The branch point that can be involved in pseudo-exon-
type aberrant splicing caused by the mutation (chr11:
5225872A > C, chr11: 5225832G > C, or chr11:
5225923G > A) in the HBB gene (SEQ ID NO: 20):

| | Location in the | Location in |
|---|---|---|
| Location in GRCh38/hg38 | causative gene | the regen |
| human reference genome | (SEQ ID NO: 20) | (SEQ ID NO: 57) |
| chr11: 5226078 | 994 | 40 |
| chr11: 5226073 | 999 | 45 |
| chr11: 5226072 | 1000 | 46 |
| chr11: 5226053 | 1019 | 65 |
| chr11: 5226052 | 1020 | 66 |
| chr11: 5226036 | 1036 | 82 |
| chr11: 5226031 | 1041 | 87 |
| chr11: 5226024 | 1048 | 94 |
| chr11: 5226012 | 1060 | 106 |

The branch point that can be involved in pseudo-exon-
type aberrant splicing caused by the mutation (chr19:
11120625G > T) in the LDLR gene (SEQ ID NO: 21):

| | Location in the | Location in |
|---|---|---|
| Location in GRCh38/hg38 | causative gene | the regen |
| human reference genome | (SEQ ID NO: 21) | (SEQ ID NO: 58) |
| chr19: 11120329 | 30867 | 80 |
| chr19: 11120332 | 30870 | 83 |
| chr19: 11120349 | 30887 | 100 |

The branch point that can be involved in pseudo-exon-
type aberrant splicing caused by the mutation (chr19:
11122956G > A) in the LDLR gene (SEQ ID NO: 21):

| | Location in the | Location in |
|---|---|---|
| Location in GRCh38/hg38 | causative gene | the regen |
| human reference genome | (SEQ ID NO: 21) | (SEQ ID NO: 59) |
| chr19: 11122732 | 33270 | 31 |
| chr19: 11122742 | 33280 | 41 |
| chr19: 11122761 | 33299 | 60 |
| chr19: 11122775 | 33313 | 74 |
| chr19: 11122776 | 33314 | 75 |
| chr19: 11122784 | 33322 | 83 |
| chr19: 11122787 | 33325 | 86 |
| chr19: 11122788 | 33326 | 87 |
| chr19: 11122791 | 33329 | 90 |
| chr19: 11122794 | 33332 | 93 |

The branch point that can be involved in pseudo-exon-
type aberrant splicing caused by the mutation (chr11:
47343314C > T) in the MYBPC3 gene (SEQ ID NO: 22):

| | Location in the | Location in |
|---|---|---|
| Location in GRCh38/hg38 | causative gene | the regen |
| human reference genome | (SEQ ID NO: 22) | (SEQ ID NO: 60) |
| chr11: 47343403 | 9300 | 30 |
| chr11: 47343387 | 9316 | 46 |
| chr11: 47343366 | 9337 | 67 |

The branch point that can be involved in pseudo-exon-
type aberrant splicing caused by the mutation (chr6:
51882440T > C) in the PKHD1 gene (SEQ ID NO: 23):

| | Location in the | Location in |
|---|---|---|
| Location in GRCh38/hg38 | causative gene | the regen |
| human reference genome | (SEQ ID NO: 23) | (SEQ ID NO: 61) |
| chr6: 51882633 | 204983 | 44 |
| chr6: 51882602 | 205014 | 75 |
| chr6: 51882595 | 205021 | 82 |
| chr6: 51882586 | 205030 | 91 |

The branch point that can be involved in pseudo-exon-
type aberrant splicing caused by the mutation (chr14:
21321131T > G) in the RPGRIP1 gene (SEQ ID NO: 24):

| | Location in the | Location in |
|---|---|---|
| Location in GRCh38/hg38 | causative gene | the regen |
| human reference genome | (SEQ ID NO: 24) | (SEQ ID NO: 62) |
| chr14: 21320926 | 40844 | 38 |
| chr14: 21320950 | 40868 | 62 |
| chr14: 21320953 | 40871 | 65 |
| chr14: 21320986 | 40904 | 98 |
| chr14: 21320989 | 40907 | 101 |

The branch point that can be involved in pseudo-exon-
type aberrant splicing caused by the mutation (chr16:
56883858C > T) in the SLC12A3 gene (SEQ ID NO: 25):

| | Location in the | Location in |
|---|---|---|
| Location in GRCh38/hg38 | causative gene | the regen |
| human reference genome | (SEQ ID NO: 25) | (SEQ ID NO: 63) |
| chr16: 56883532 | 18326 | 34 |
| chr16: 56883554 | 18348 | 56 |
| chr16: 56883571 | 18365 | 73 |
| chr16: 56883587 | 18381 | 89 |

The branch point that can be involved in pseudo-exon-
type aberrant splicing caused by the mutation (chr16:
56893307C > T) in the SLC12A3 gene (SEQ ID NO: 25):

| | Location in the | Location in |
|---|---|---|
| Location in GRCh38/hg38 | causative gene | the regen |
| human reference genome | (SEQ ID NO: 25) | (SEQ ID NO: 64) |
| chr16: 56893142 | 27936 | 47 |
| chr16: 56893174 | 27968 | 79 |
| chr16: 56893179 | 27973 | 84 |

The branch point that can be involved in pseudo-exon-
type aberrant splicing caused by the mutation (chr1:
215891198T > C) in the USH2A gene (SEQ ID NO: 26):

| | Location in the | Location in |
|---|---|---|
| Location in GRCh38/hg38 | causative gene | the regen |
| human reference genome | (SEQ ID NO: 26) | (SEQ ID NO: 65) |
| chr1: 215891437 | 532012 | 34 |
| chr1: 215891434 | 532015 | 37 |
| chr1: 215891429 | 532020 | 42 |
| chr1: 215891428 | 532021 | 43 |
| chr1: 215891420 | 532029 | 51 |
| chr1: 215891415 | 532034 | 56 |
| chr1: 215891398 | 532051 | 73 |
| chr1: 215891391 | 532058 | 80 |
| chr1: 215891390 | 532059 | 81 |
| chr1: 215891366 | 532083 | 105 |

The branch point that can be involved in pseudo-exon-
type aberrant splicing caused by the mutation (chr1:
215794441T > C) in the USH2A gene (SEQ ID NO: 26):

| | Location in the | Location in |
|---|---|---|
| Location in GRCh38/hg38 | causative gene | the regen |
| human reference genome | (SEQ ID NO: 26) | (SEQ ID NO: 66) |
| chr1: 215794677 | 628772 | 40 |
| chr1: 215794674 | 628775 | 43 |
| chr1: 215794671 | 628778 | 46 |
| chr1: 215794660 | 628789 | 57 |
| chr1: 215794659 | 628790 | 58 |
| chr1: 215794652 | 628797 | 65 |
| chr1: 215794644 | 628805 | 73 |
| chr1: 215794620 | 628829 | 97 |
| chr1: 215794611 | 628838 | 106 |

The branch point that can be involved in pseudo-exon-
type aberrant splicing caused by the mutation (chr8:
31108591A > G) in the WRN gene (SEQ ID NO: 27):

| | Location in the | Location in |
|---|---|---|
| Location in GRCh38/hg38 | causative gene | the regen |
| human reference genome | (SEQ ID NO: 27) | (SEQ ID NO: 67) |
| chr8: 31108392 | 74583 | 28 |
| chr8: 31108395 | 74586 | 31 |
| chr8: 31108410 | 74601 | 46 |
| chr8: 31108413 | 74604 | 49 |
| chr8: 31108431 | 74622 | 67 |
| chr8: 31108438 | 74629 | 74 |
| chr8: 31108450 | 74641 | 86 |
| chr8: 31108453 | 74644 | 89 |
| chr8: 31108456 | 74647 | 92 |
| chr8: 31108457 | 74648 | 93 |
| chr8: 31108463 | 74654 | 99 |
| chr8: 31108467 | 74658 | 103 |

[0106] In one or more embodiments, the branch point that can be involved in pseudo-exon-type aberrant splicing caused by the mutation (chr1:94084225G>A) in the ABCA4 gene may be an adenine base at chr1:94084303.

[0107] In one or more embodiments, the branch point that can be involved in pseudo-exon-type aberrant splicing caused by the mutation (chr1:94081224C>G) in the ABCA4 gene may be an adenine base at chr1:94081251.

[0108] In one or more embodiments, the branch point that can be involved in pseudo-exon-type aberrant splicing caused by the mutation (chr1:94062142G>C) in the ABCA4 gene may be an adenine base at chr1:94062224.

[0109] In one or more embodiments, the branch point that can be involved in pseudo-exon-type aberrant splicing caused by the mutation (chr1:94028345T>C) in the ABCA4 gene may be an adenine base at chr1:94028466.

[0110] In one or more embodiments, the branch point that can be involved in pseudo-exon-type aberrant splicing caused by the mutation (chr1:94028345T>C) in the ABCA4 gene may be an adenine base at chr1:94028506.

[0111] In one or more embodiments, the branch point that can be involved in pseudo-exon-type aberrant splicing caused by the mutation (chr1:94027444C>T) in the ABCA4 gene may be an adenine base at chr1:94027606.

[0112] In one or more embodiments, the branch point that can be involved in pseudo-exon-type aberrant splicing caused by a mutation (chr11:17444325T>C) in the ABCC8 gene may be an adenine base at chr11:17444455.

[0113] In one or more embodiments, the branch point that can be involved in pseudo-exon-type aberrant splicing caused by the mutation (chr5:112790640T>G) in the APC gene may be an adenine base at chr5:112790493.

[0114] In one or more embodiments, the branch point that can be involved in pseudo-exon-type aberrant splicing caused by the mutation (chr5:112822720A>G, chr5:112822722C>T, chr5:112822726A>T, or chr5:112822734G>A) in the APC gene may be an adenine base at chr5:112822616.

[0115] In one or more embodiments, the branch point that can be involved in pseudo-exon-type aberrant splicing caused by the mutation (chr5:112779849G>A) in the APC gene may be an adenine base at chr5:112779660.

[0116] In one or more embodiments, the branch point that can be involved in pseudo-exon-type aberrant splicing caused by the mutation (chr11:108270483_108270486del) in the ATM gene may be an adenine base at chr11:108270408.

[0117] In one or more embodiments, the branch point that can be involved in pseudo-exon-type aberrant splicing caused by the mutation (chr11:108309110A>G) in the ATM gene may be an adenine base at chr11:108308954.

[0118] In one or more embodiments, the branch point that can be involved in pseudo-exon-type aberrant splicing caused by the mutation (chr17:43086839G>A) in the BRCA1 gene may be an adenine base at chr17:43086981.

[0119] In one or more embodiments, the branch point that can be involved in pseudo-exon-type aberrant splicing caused by the mutation (chr13:32345247T>G) in the BRCA2 gene may be an adenine base at chr13:32345085.

[0120] In one or more embodiments, the branch point that can be involved in pseudo-exon-type aberrant splicing caused by the mutation (chr17:61781503T>A) in the BRIP1 gene may be an adenine base at chr17:61782523.

[0121] In one or more embodiments, the branch point that can be involved in pseudo-exon-type aberrant splicing caused by the mutation (chr12:88101183T>C) in the CEP290 gene may be an adenine base at chr12:88101332.

[0122] In one or more embodiments, the branch point that can be involved in pseudo-exon-type aberrant splicing caused by the mutation (chr7:117578327A>G) in the CFTR gene may be an adenine base at chr7:117578182.

[0123] In one or more embodiments, the branch point that can be involved in pseudo-exon-type aberrant splicing caused by the mutation (chr7:117589467A>G) in the CFTR gene may be an adenine base at chr7:117589396.

[0124] In one or more embodiments, the branch point that can be involved in pseudo-exon-type aberrant splicing caused by the mutation (chr7:117639961C>T) in the CFTR gene may be an adenine base at chr7:117639851.

[0125] In one or more embodiments, the branch point that can be involved in pseudo-exon-type aberrant splicing caused by the mutation (chr3:150942410A>C) in the CLRN1 gene may be an adenine base at chr3:150942661.

[0126] In one or more embodiments, the branch point that can be involved in pseudo-exon-type aberrant splicing caused by the mutation (chr8:86605416C>T) in the CNGB3 gene may be an adenine base at chr8:86605515.

[0127] In one or more embodiments, the branch point that can be involved in pseudo-exon-type aberrant splicing caused by the mutation (chr21:45989967C>T) in the COL6A1 gene may be an adenine base at chr21:45989871.

[0128] In one or more embodiments, the branch point that can be involved in pseudo-exon-type aberrant splicing caused by the mutation (chr2:71661900G>T) in the DYSF gene may be an adenine base at chr2:71661637.

[0129] In one or more embodiments, the branch point that can be involved in pseudo-exon-type aberrant splicing caused by the mutation (chr9:105606576G>T) in the FKTN gene may be an adenine base at chr9:105606469.

[0130] In one or more embodiments, the branch point that can be involved in pseudo-exon-type aberrant splicing caused by the mutation (chr17:80104542T>G) in the GAA gene may be an adenine base at chr17:80104322.

[0131] In one or more embodiments, the branch point that can be involved in pseudo-exon-type aberrant splicing caused by the mutation (chr9:34649954A>G) in the GALT gene may be an adenine base at chr9:34649926.

[0132] In one or more embodiments, the branch point that can be involved in pseudo-exon-type aberrant splicing caused by the mutation (chr5:42700794A>G) in the GHR gene may be an adenine base at chr5:42700670.

[0133] In one or more embodiments, the branch point that can be involved in pseudo-exon-type aberrant splicing caused by the mutation (chrX:101399747C>T) in the GLA gene may be an adenine base at chrX: 101399822.

[0134] In one or more embodiments, the branch point that can be involved in pseudo-exon-type aberrant splicing caused by the mutation (chr4:108023948A>G) in the HADH gene may be an adenine base at chr4:108023921.

[0135] In one or more embodiments, the branch point that can be involved in pseudo-exon-type aberrant splicing caused by the mutation (chr11:5225872A>C, chr11:5225832G>C, or chr11:5225923G>A) in the EBB gene may be an adenine base at chr11:5226012.

[0136] In one or more embodiments, the branch point that can be involved in pseudo-exon-type aberrant splicing caused by the mutation (chr19:11120625G>T) in the LDLR gene may be an adenine base at chr19:11120349.

[0137] In one or more embodiments, the branch point that can be involved in pseudo-exon-type aberrant splicing caused by the mutation (chr19:11122956G>A) in the LDLR gene may be an adenine base at chr19:11122761.

[0138] In one or more embodiments, the branch point that can be involved in pseudo-exon-type aberrant splicing caused by the mutation (chr11:47343314C>T) in the MYBPC3 gene may be an adenine base at chr11:47343366.

[0139] In one or more embodiments, the branch point that can be involved in pseudo-exon-type aberrant splicing caused by the mutation (chr6:51882440T>C) in the PKHD1 gene may be an adenine base at chr6:51882586.

[0140] In one or more embodiments, the branch point that can be involved in pseudo-exon-type aberrant splicing caused by the mutation (chr14:21321131T>G) in the RPGRIP1 gene may be an adenine base at chr14:21320953.

[0141] In one or more embodiments, the branch point that can be involved in pseudo-exon-type aberrant splicing caused by the mutation (chr16:56883858C>T) in the SLC12A3 gene may be an adenine base at chr16:56883587.

[0142] In one or more embodiments, the branch point that can be involved in pseudo-exon-type aberrant splicing caused by the mutation (chr16:56893307C>T) in the SLC12A3 gene may be an adenine base at chr16:56893174.

[0143] In one or more embodiments, the branch point that can be involved in pseudo-exon-type aberrant splicing caused by the mutation (chr1:215891198T>C) in the USH2A gene may be an adenine base at chr1:215891390.

[0144] In one or more embodiments, the branch point that can be involved in pseudo-exon-type aberrant splicing caused by the mutation (chr1:215794441T>C) in the USH2A gene may be an adenine base at chr1:215794611.

[0145] In one or more embodiments, the branch point that can be involved in pseudo-exon-type aberrant splicing caused by the mutation in the WRN gene (chr8:31108591A>G) may be an adenine base at chr8:31108457.

[0146] In one or more embodiments, the target sequence of the antisense oligonucleotide of the present disclosure is a sequence including a branch point in pseudo-exon-type aberrant splicing. The “target sequence” in the present disclosure refers to a target nucleic acid sequence to which the antisense oligonucleotide of the present disclosure hybridizes, and can also be referred to as a sequence with which the antisense oligonucleotide forms a complementary hybrid. The target sequence in the present disclosure is a pre-mRNA sequence of each gene in one or more embodiments. The “pre-mRNA” in the present disclosure can also be referred to as an mRNA precursor, and refers to an RNA that includes both exons and introns.

[0147] Although the antisense oligonucleotide of the present disclosure includes a sequence complementary to the target sequence in one or more embodiments, such a sequence need not necessarily be perfectly complementary to the target sequence. In one or more embodiments, the antisense oligonucleotide of the present disclosure may include mismatches to the extent that the antisense oligonucleotide can form a hybrid with a target sequence including a branch point in pseudo-exon-type aberrant splicing. In one or more embodiments, the antisense oligonucleotide of the present disclosure need only be such that at least 40% of bases thereof are complementary to the target sequence, and preferably at least 45%, at least 50%, at least 55%, at least 60%, at least 65%, at least 70%, at least 75%, at least 80%, at least 85%, at least 90%, at least 91%, at least 92%, at least 93%, at least 94%, at least 95%, at least 96%, at least 97%, at least 98%, at least 99%, or 100% of bases thereof are complementary to the target sequence.

[0148] In one or more embodiments, examples of the target sequence in the present disclosure include a base sequence consisting of 10 to 50 successive bases in any of regions (1) to (40) (base sequences represented by SEQ ID NOs: 28 to 67) to be described below and including a branch point in pseudo-exon-type aberrant splicing. In one or more embodiments, the branch point is as described above.

[0149] In one or more embodiments, the length of the target sequence can be determined according to the length and the like of the antisense oligonucleotide intended to be obtained. In one or more embodiments, the length of the target sequence is 10 to 50 bases. In one or more embodiments, the length of the target sequence is 11 bases or more, 12 bases or more, 13 bases or more, 14 bases or more, or 15 bases or more. In one or more embodiments, the length of the target sequence is 45 bases or less, 40 bases or less, 39 bases or less, 38 bases or less, 37 bases or less, 36 bases or less, 35 bases or less, 34 bases or less, 33 bases or less, 32 bases or less, 30 bases or less, 29 bases or less, 28 bases or less, 27 bases or less, 26 bases or less, or 25 bases or less.

[0150] In one or more embodiments, the antisense oligonucleotide of the present disclosure is an antisense oligonucleotide whose target sequence is a sequence including at least one branch point selected from the group consisting of the above-described branch points (adenine bases) that can be involved in pseudo-exon-type aberrant splicing. Since the target sequence of the antisense oligonucleotide of the present disclosure is a sequence including a branch point(s) (adenine bases) that can be involved in pseudo-exon-type aberrant splicing in one or more embodiments, the antisense oligonucleotide of the present disclosure has activity capable of suppressing and/or correcting pseudo-exon-type splicing defects in which the branch point(s) is involved.

[0151] In one or more embodiments, the antisense oligonucleotide of the present disclosure is an RNA molecule that is complementary to a target sequence consisting of 10 to 50 successive bases in the base sequence represented by any of SEQ ID NOs: 28 to 67 (any of regions (1) to (40)) and is designed so as to bind to a sequence including a branch point(s) in pseudo-exon-type aberrant splicing present in the target sequence, thereby correcting the pseudo-exon-type aberrant splicing. In one or more embodiments, examples of the branch point include those described above.

[0152] SEQ ID NO: 28 is an example of a region where a branch point that can be involved in pseudo-exon-type aberrant splicing is present in the ABCA4 gene, and represents the base sequence of a region (1) from 94084339th to 94084229th bases (36810th to 36920th bases in SEQ ID NO: 1) in the base sequence of human chromosome 1 in the GRCh38/hg38 human reference genome list.

(SEQ ID NO: 28)
AAGTCCAGCTGGTTAAAAGGCACATGCCCAGTGCTCACTTCACACCT
ACTCAGGAAGCACACTTGAGTTGGAAAACCACTGTCTTTACACTTAG
AACTCAGTCCTACATGA

[0153] SEQ ID NO: 29 is another example of a region where a branch point that can be involved in pseudo-exon-type aberrant splicing is present in the ABCA4 gene, and represents the base sequence of a region (2) from 94081341st to 94081231st bases (39808th to 39918th bases in SEQ ID NO: 1) in the base sequence of human chromosome 1 in the GRCh38/hg38 human reference genome list.

(SEQ ID NO: 29)
ATTTGCCCAAGGACACATTCCCAACGAATTCAAATAAAGGAGACTAG
AAGAAGAGAGGCTATACTACAGTGCTCTAGGGGTCACTCTGTGATTT
GTTGTTGTTGTTGTTGT

[0154] SEQ ID NO: 30 is still another example of a region where a branch point that can be involved in pseudo-exon-type aberrant splicing is present in the ABCA4 gene, and represents the base sequence of a region (3) from 94062301st to 94062191st bases (58848th to 58958th bases in SEQ ID NO: 1) in the base sequence of human chromosome 1 in the GRCh38/hg38 human reference genome list.

(SEQ ID NO: 30)
TGGGGGAGGGGACAAATTCCCCACTATGTAGTATGTTTGGTATGTGG
AAGGGTTCTGGTCAGAATGTTTGCCCAATGATTGCCACATCAGCATT
CATTTTGGACTCTGTAT

[0155] SEQ ID NO: 31 is still another example of a region where a branch point that can be involved in pseudo-exon-type aberrant splicing is present in the ABCA4 gene, and represents the base sequence of a region (4) from 94028532nd to 94028422nd bases (92617th to 92727th bases in SEQ ID NO: 1) in the base sequence of human chromosome 1 in the GRCh38/hg38 human reference genome list.

(SEQ ID NO: 31)
ATGGAAATGTGTTTACACACTTATTAACAGTCTTAATTAAGAAGCTC
TCCATGTGCTGTGTCTCTAACATCTGCAGGTATGTACACAAATACAT
GCACAGCCAGCATCCAT

[0156] SEQ ID NO: 32 is still another example of a region where a branch point that can be involved in pseudo-exon-type aberrant splicing is present in the ABCA4 gene, and represents the base sequence of a region (5) from 94028576th to 94028466th bases (92573rd to 92683rd bases in SEQ ID NO: 1) in the base sequence of human chromosome 1 in the GRCh38/hg38 human reference genome list.

(SEQ ID NO: 32)
TTTTAGTTTTCACCATTATAAGCAATGCTATGATGTACATTCAAATG
GAAATGTGTTTACACACTTATTAACAGTCTTAATTAAGAAGCTCTCC
ATGTGCTGTGTCTCTAA

[0157] SEQ ID NO: 33 is an example of a region where a branch point that can be involved in pseudo-exon-type aberrant splicing is present in the ABCA4 gene, and represents the base sequence of a region (6) from 94027674th to 94027564th bases (93475th to 93585th bases in SEQ ID NO: 1) in the base sequence of human chromosome 1 in the GRCh38/hg38 human reference genome list.

(SEQ ID NO: 33)
TATCACAGTCTGGTTTATAAATGGTTCTAGGCCAAGAACACCCGATC
CCTGCTCTTTTTTATATTCTAAAGCATGTATCTTTATATTTCTCAAG
CAATATTTTCTCTCTTT

[0158] SEQ ID NO: 34 is an example of a region where a branch point that can be involved in pseudo-exon-type aberrant splicing is present in the ABCC8 gene, and represents the base sequence of a region (7) from 17444521st to 17444411th bases (32325th to 32435th bases in SEQ ID NO: 2) in the base sequence of human chromosome 11 in the GRCh38/hg38 human reference genome list.

(SEQ ID NO: 34)
CAGCACCAGCTCCCACCCCAGCCTCTGCCAGTCTCTTGGAGGTGGTG
TGGGTGCAGACACCGGCTCACAAGGTGCCCTGTTAGTGAGCTTGGGG
TGCCATGGGAGCCTTCT

[0159] SEQ ID NO: 35 is an example of a region where a branch point that can be involved in pseudo-exon-type aberrant splicing is present in the APC gene, and represents the base sequence of a region (8) from 112790393rd to 112790503rd bases (82896th to 83006th bases in SEQ ID NO: 3) in the base sequence of human chromosome 5 in the GRCh38/hg38 human reference genome list.

(SEQ ID NO: 35)
TCAGCTCACTGCAACCTCTGCCTCCTGGGTTCGAGCGATTCTCCTGC
CTTAGCCTCCCGAGTAGCTGGGATTACAGGCACGCGTCACCCATGCC
TGGCTAATTTCTTTTTG

[0160] SEQ ID NO: 36 is another example of a region where a branch point that can be involved in pseudo-exon-type aberrant splicing is present in the APC gene, and represents the base sequence of a region (9) from 112822518th to 112822628th bases (115021st to 115131st bases in SEQ ID NO: 3) in the base sequence of human chromosome 5 in the GRCh38/hg38 human reference genome list.

(SEQ ID NO: 36)
AAACATTTCATTATAACTTTGGAATGATTACTTCTTTAGGTATGTAT
TTTCACACACTAAGCCTTATATAACCAGCAGTGCACTCCATTTTTTA
TGTAATGGTTTTTCTTT

[0161] SEQ ID NO: 37 is still another example of a region where a branch point that can be involved in pseudo-exon-type aberrant splicing is present in the APC gene, and represents the base sequence of a region (10) from 112779563rd to 112779673rd bases (72067th to 72177th bases in SEQ ID NO: 3) in the base sequence of human chromosome 5 in the GRCh38/hg38 human reference genome list.

(SEQ ID NO: 37)
AGCCAAGCTAATGAACACTTTATGTGGAAATACCTACTTATCAAAAC
ATTACTGAAAACATCAGATCTAAACCACATTATTGCAACATACTGTG
TCATGTTCAATTTTTTT

[0162] SEQ ID NO: 38 is an example of a region where a branch point that can be involved in pseudo-exon-type aberrant splicing is present in the ATM gene, and represents the base sequence of a region (11) from 108270351st to 108270461st bases (47285th to 47395th bases in SEQ ID NO: 4) in the base sequence of human chromosome 11 in the GRCh38/hg38 human reference genome list.

(SEQ ID NO: 38)
GAGACTTACAGTTTCAGAATCTTGCTCAAGCTCTTAACTGCAACAGT
GGTAATAATGATCATTTATTGAATTCCACAATAGAAGCTAGACTTTT
ACGTTTATTTTCTCTAA

[0163] SEQ ID NO: 39 is another example of a region where a branch point that can be involved in pseudo-exon-type aberrant splicing is present in the ATM gene, and represents the base sequence of a region (12) from 108308849th to 108308959th bases (85783rd to 85893rd bases in SEQ ID NO: 4) in the base sequence of human chromosome 11 in the GRCh38/hg38 human reference genome list.

(SEQ ID NO: 39)
ACCTTAGAGTTTTATACCAGATTATCTTCTGAGGAGGCCTATCAGAA
GCTTTAATGTAGTGGAGAGCATTTGTTTTCTTGGTGTTGGGAGGCAG
TTTTACCTTTGAGTCAT

[0164] SEQ ID NO: 40 is an example of a region where a branch point that can be involved in pseudo-exon-type aberrant splicing is present in the BRCA1 gene, and represents the base sequence of a region (13) from 43087074th to 43086964th bases (38291st to 38401st bases in SEQ ID NO: 5) in the base sequence of human chromosome 17 in the GRCh38/hg38 human reference genome list.

(SEQ ID NO: 40)
TCCCATTTTCCTGTACCTTGCCAACACTGGGTGATATCCAGTTTTAA
AATCTAAATCTTGCATTGCTATGAGAACTACAATTAGAGAAGGCTTA
TCTTCTACTGCCCATTC

[0165] SEQ ID NO: 41 is an example of a region where a branch point that can be involved in pseudo-exon-type aberrant splicing is present in the BRCA2 gene, and represents the base sequence of a region (14) from 32345028th to 32345138th bases (29521st to 29631st bases in SEQ ID NO: 6) in the base sequence of human chromosome 13 in the GRCh38/hg38 human reference genome list.

(SEQ ID NO: 41)
AAGTAGTAGAAAGCTGTCAAGCTTACAGAGCCAGATACAAGCTTCCCAA
AAATTCTGATTTTCATCTAAAAGCTTGAATTTTTCCCCGGCAATAAGTA
TTGTCACTTATTT

[0166] SEQ ID NO: 42 is an example of a region where a branch point that can be involved in pseudo-exon-type aberrant splicing is present in the BRIP1 gene, and represents the base sequence of a region (15) from 61/782,587th to 61/782,477th bases (80942nd to 81052nd bases in SEQ ID NO: 7) in the base sequence of human chromosome 17 in the GRCh38/hg38 human reference genome list.

(SEQ ID NO: 42)
CTCTCATTCTGTGGGTTGTTTTTTCATTTATTCATAGTGTCCTTTGATG
CAGAAAAGGTTTTTAATCTTGTTGAAGTCCAATTTATCTTTCTCTTTTC
TTGTTGTTGCCTG

[0167] SEQ ID NO: 43 is an example of a region where a branch point that can be involved in pseudo-exon-type aberrant splicing is present in the CEP290 gene, and represents the base sequence of a region (16) from 88101435th to 88101325th bases (40654th to 40764th bases in SEQ ID NO: 8) in the base sequence of human chromosome 12 in the GRCh38/hg38 human reference genome list.

(SEQ ID NO: 43)
CATCTTGGCTCACTGCAAGCTCCACCTCCCGGGTTCAGGCCGTTCTCCT
GCCTCAGCCTCCTGAGTAGCTGGTACCACAGGCACCCACCATCATGCCC
GGCTAATTTTTTG

[0168] SEQ ID NO: 44 is an example of a region where a branch point that can be involved in pseudo-exon-type aberrant splicing is present in the CFTR gene, and represents the base sequence of a region (17) from 117578099th to 117578209th bases (98075th to 98185th bases in SEQ ID NO: 9) in the base sequence of human chromosome 7 in the GRCh38/hg38 human reference genome list.

(SEQ ID NO: 44)
ATTCAATTGTATATGTGTATATAGCCAAGTTATTGTACAGTTGACCTTT
GAACAACACGGGTTTGAACTATGCAGGTCCACTTACACGTATTTTTTTT
TTCCGTTTCTGAC

[0169] SEQ ID NO: 45 is another example of a region where a branch point that can be involved in pseudo-exon-type aberrant splicing is present in the CFTR gene, and represents the base sequence of a region (18) from 117589298th to 117589408th bases (109274th to 109384th bases in SEQ ID NO: 9) in the base sequence of human chromosome 7 in the GRCh38/hg38 human reference genome list.

(SEQ ID NO: 45)
AGTTACACTATAAAGGTTGTTTTAGACTTTTAAAGTTTTGCCATTGGTT
TTTAAAAAAATTTTTAAATTGGCTTTAAAAATTTCTTAATTGTGTGCTG
AATACAATTTTCT

[0170] SEQ ID NO: 46 is still another example of a region where a branch point that can be involved in pseudo-exon-type aberrant splicing is present in the CFTR gene, and represents the base sequence of a region (19) from 117639756th to 117639866th bases (159732nd to 159842nd bases in SEQ ID NO: 9) in the base sequence of human chromosome 7 in the GRCh38/hg38 human reference genome list.

(SEQ ID NO: 46)
TTGAATCATTCAGTGGGTATAAGCAGCATATTCTCAATACTATGTTTCA
TTAATAATTAATAGAGATATATGAACACATAAAAGATTCAATTATAATC
ACCTTGTGGATCT

[0171] SEQ ID NO: 47 is an example of a region where a branch point that can be involved in pseudo-exon-type aberrant splicing is present in the CLRN1 gene, and represents the base sequence of a region (20) from 150942759th to 150942649th bases (30241st to 30351st bases in SEQ ID NO: 10) in the base sequence of human chromosome 3 in the GRCh38/hg38 human reference genome list.

(SEQ ID NO: 47)
TTAAATGAGAAGTGACACATGCGTAAAAGGGGGAAAAGCATTGATTGTG
GCCATTTTTGGAGATAAGCTATCACGTTTATTTGTTTGTTTGCTTTCTA
ATGGTCTGTCTTC

[0172] SEQ ID NO: 48 is an example of a region where a branch point that can be involved in pseudo-exon-type aberrant splicing is present in the CNGB3 gene, and represents the base sequence of a region (21) from 86605573rd to 86605463rd bases (138062nd to 138172nd bases in SEQ ID NO: 11) in the base sequence of human chromosome 8 in the GRCh38/hg38 human reference genome list.

(SEQ ID NO: 48)
TAGTGTATTCTAATTCTTTCAAAGTATGGTTAATGAGAATATTTGATTA
ACTCAAATAACCCAGTCCCCTCCTAAGCCAAGTAAGTGAATTTATTGTA
TTAATGCTATTTT

[0173] SEQ ID NO: 49 is an example of a region where a branch point that can be involved in pseudo-exon-type aberrant splicing is present in the COL6A1 gene, and represents the base sequence of a region (22) from 45989774th to 45989884th bases (8005th to 8115th bases in SEQ ID NO: 12) in the base sequence of human chromosome 21 in the GRCh38/hg38 human reference genome list.

(SEQ ID NO: 49)
AGAAGGTGAGTGAGGCTCGACCTCGGAGCTGGTCTCTCCAGGCGCAGAT
GTGCCATCCTGGACGAGGGTGTCCCCGGGGATGAGGACAGTGTCCCTGA
CAGGAGACCACGT

[0174] SEQ ID NO: 50 is an example of a region where a branch point that can be involved in pseudo-exon-type aberrant splicing is present in the DYSF gene, and represents the base sequence of a region (23) from 71661602nd to 71661712th bases (208042nd to 208152nd bases in SEQ ID NO: 13) in the base sequence of human chromosome 2 in the GRCh38/hg38 human reference genome list.

(SEQ ID NO: 50)
TGCCCATTGCATGGGAGTAATTCCTAGGCATCCTGAATTGCTGTTTGGA
TGTGAGCTTGTTTAGGCCAGAGAGGGGAGGATGCAGAGGGAGGGTGGCA
GCTATTTCTCTCG

[0175] SEQ ID NO: 51 is an example of a region where a branch point that can be involved in pseudo-exon-type aberrant splicing is present in the FKTN gene, and represents the base sequence of a region (24) from 105606387th to 105606497th bases (48258th to 48368th bases in SEQ ID NO: 14) in the base sequence of human chromosome 9 in the GRCh38/hg38 human reference genome list.

(SEQ ID NO: 51)
TTTGATTAGCTATAGTTTATAATATTAACAATTACAGGATTAAAAACAT
TCTTGAAGTTATACTTGGAGTATGAAGTTTCTAACCTAGAATTGTTCCT
TTTATTCTCCTTT

[0176] SEQ ID NO: 52 is an example of a region where a branch point that can be involved in pseudo-exon-type aberrant splicing is present in the GAA gene, and represents the base sequence of a region (25) from 80104281st to 80104391st bases (2701st to 2811th bases in SEQ ID NO: 15) in the base sequence of human chromosome 17 in the GRCh38/hg38 human reference genome list.

(SEQ ID NO: 52)
GCTGGTCTTCCTGGGGACATTCTAAGCGTGTTTGATTTGTAACATTTTA
GCAGACTGTGCAAGTGCTCTGCACTCCCCTGCTGGAGCTTTTCTCGCCC
TTCCTTCTGGCCC

[0177] SEQ ID NO: 53 is an example of a region where a branch point that can be involved in pseudo-exon-type aberrant splicing is present in the GALT gene, and represents the base sequence of a region (26) from 34649835th to 34649945th bases (3161st to 3271st bases in SEQ ID NO: 16) in the base sequence of human chromosome 9 in the GRCh38/hg38 human reference genome list.

(SEQ ID NO: 53)
GCTAAACTCTTTCATCCCCTGGTGGCTTCAGCAGTCCTTATCACCAGCC
TCACAATCCCACAGGCCCACCCCCAGTGGGCCTGTGGCATTCATATTTC
ATATTCATATTTC

SEQ ID NO: 54 is an example of a region where a branch point that can be involved in pseudo-exon-type aberrant splicing is present in the GHR gene, and represents the base sequence of a region (27) from 42700567th to 42700677th bases (277129th to 277239th bases in SEQ ID NO: 17) in the base sequence of human chromosome 5 in the GRCh38/hg38 human reference genome list.

(SEQ ID NO: 54)
TCCTTACCAAGCATATGGAACTCAGCATTTTGATAAATTTCACATGGCA
CATAACAAGAGGAAAAACAGGAGTATCATGCTGCTCCCAATATAACTAA
TTCTAAATCTGTC

[0178] SEQ ID NO: 55 is an example of a region where a branch point that can be involved in pseudo-exon-type aberrant splicing is present in the GLA gene, and represents the base sequence of a region (28) from 101399920th to 101399810th bases (8006th to 8116th bases in SEQ ID NO: 18) in the base sequence of human chromosome X in the GRCh38/hg38 human reference genome list.

(SEQ ID NO: 55)
CTTAACATTGAAGTCGCAGACCAAACGCCACATATGCAGACAGTTCTTC
TCTAACTACTTTAAAATAGCCCTCTGTCCATTCATTCTTCATCACATTA
ACCTGTTTAATTT

[0179] SEQ ID NO: 56 is an example of a region where a branch point that can be involved in pseudo-exon-type aberrant splicing is present in the HADH gene, and represents the base sequence of a region (29) from 108023829th to 108023939th bases (33941st to 34051st bases in SEQ ID NO: 19) in the base sequence of human chromosome 4 in the GRCh38/hg38 human reference genome list.

(SEQ ID NO: 56)
GACTGCTCTCTGTCCTGGCTTTTGTCTCCTGATGAATGGCTGCATTTTC
ATAAATGATTTTAGGTACAGCTTGGTAAACACATACCTCCCTAACAGAA
AATGAGGGCTTTA

[0180] SEQ ID NO: 57 is an example of a region where a branch point that can be involved in pseudo-exon-type aberrant splicing is present in the HBB gene, and represents the base sequence of a region (30) from 5226117th to 5226007th bases (955th to 1065th bases in SEQ ID NO: 20) in the base sequence of human chromosome 11 in the GRCh38/hg38 human reference genome list.

(SEQ ID NO: 57)
TACACATATTGACCAAATCAGGGTAATTTTGCATTTGTAATTTTAAAAA
ATGCTTTCTTCTTTTAATATACTTTTTTGTTTATCTTATTTCTAATACT
TTCCCTAATCTCT

[0181] SEQ ID NO: 58 is an example of a region where a branch point that can be involved in pseudo-exon-type aberrant splicing is present in the LDLR gene, and represents the base sequence of a region (31) from 11120250th to 11120360th bases (30788th to 30898th bases in SEQ ID NO: 21) in the base sequence of human chromosome 19 in the GRCh38/hg38 human reference genome list.

(SEQ ID NO: 58)
CCCACCCCCCCAACCTTGAAACCTCCTTGTGGAAACTCTGGAATGTTCT
GGAAATTTCTGGAATCTTCTGGTATAGCTGATGATCTCGTTCCTGCCCT
GACTCCGCTTCTT

[0182] SEQ ID NO: 59 is another example of a region where a branch point that can be involved in pseudo-exon-type aberrant splicing is present in the LDLR gene, and represents the base sequence of a region (32) from 11122702nd to 11122812th bases (33240th to 33350th bases in SEQ ID NO: 21) in the base sequence of human chromosome 19 in the GRCh38/hg38 human reference genome list.

(SEQ ID NO: 59)
TGAGCCACCTCGCCCAGCCTGAGCCACCTCACCCAGCCTAAGCCACTGT
GCCTGGCCTGATTTTGGACTTTTTAAAAATTTTATTAATAATTATTTTT
GGGTTTCTTTTTT

[0183] SEQ ID NO: 60 is an example of a region where a branch point that can be involved in pseudo-exon-type aberrant splicing is present in the MYBPC3 gene, and represents the base sequence of a region (33) from 47343432nd to 47343322nd bases (9271st to 9381st bases in SEQ ID NO: 22) in the base sequence of human chromosome 11 in the GRCh38/hg38 human reference genome list.

(SEQ ID NO: 60)
TCCTGCCCCTCTCCACATGCGTATCTCTGACTCGGTGTGGCTCTCAGCC
CCATCTCTCTGGGCCTAATTTCCCATCCTTTTGCTCCTGCCGGTCCCTC
TCTCTCTCTCCTT

[0184] SEQ ID NO: 61 is an example of a region where a branch point that can be involved in pseudo-exon-type aberrant splicing is present in the PKHD1 gene, and represents the base sequence of a region (34) from 51882676th to 51882566th bases (204940th to 205050th bases in SEQ ID NO: 23) in the base sequence of human chromosome 6 in the GRCh38/hg38 human reference genome list.

(SEQ ID NO: 61)
GATGGGGCAAAGAGTACTCCCGGGTGGGAAGCACTAGTTCCTAAGTGGG
GGTTCCTGGCTGCCATTGGTCTCTTAGGCTTCAGGTCTATAATGGATCC
CCTATGTTCTTGT

[0185] SEQ ID NO: 62 is an example of a region where a branch point that can be involved in pseudo-exon-type aberrant splicing is present in the RPGRIP1 gene, and represents the base sequence of a region (35) from 21320889th to 21320999th bases (40807th to 40917th bases in SEQ ID NO: 24) in the base sequence of human chromosome 14 in the GRCh38/hg38 human reference genome list.

(SEQ ID NO: 62)
CTGTGCCCTGCTTGAGGACACTTTTTGGAAAACTGTGAGAAGGCAGAGC
GTAGAGAACTTCATGAGCTCCACCCATTTCTTCCACTCTTTGCAGCTCA
TAAAATTTAGAAT

[0186] SEQ ID NO: 63 is an example of a region where a branch point that can be involved in pseudo-exon-type aberrant splicing is present in the SLC12A3 gene, and represents the base sequence of a region (36) from 56883499th to 56883609th bases (18293rd to 18403rd bases in SEQ ID NO: 25) in the base sequence of human chromosome 16 in the GRCh38/hg38 human reference genome list.

(SEQ ID NO: 63)
CTCGATCTCCTGACCTCATGATCCGCCCGCCTCAGCCTCCCAAAGTGCT
GGGATTACAGTTGTGCCTGGCTGAGGAAGACTTTTTCTAACCAGCTCCA
AATTGCCATTGTC

[0187] SEQ ID NO: 64 is another example of a region where a branch point that can be involved in pseudo-exon-type aberrant splicing is present in the SLC12A3 gene, and represents the base sequence of a region (37) from 56893096th to 56893206th bases (27890th to 28000th bases in SEQ ID NO: 25) in the base sequence of human chromosome 16 in the GRCh38/hg38 human reference genome list.

(SEQ ID NO: 64)
CGGGGTGGTGGTGGTCTTCCTTCCTTCTCCTTCCTGGCCTGCTCTCAAA
GGGGACAGGGGCTCCTGGGCCCAGCAGTGAGCTCAGGGGAGCCCAGAGG
GACCCCTCTGTCT

[0188] SEQ ID NO: 65 is an example of a region where a branch point that can be involved in pseudo-exon-type aberrant splicing is present in the USH2A gene, and represents the base sequence of a region (38) from 215891470th to 215891360th bases (531979th to 532089th bases in SEQ ID NO: 26) in the base sequence of human chromosome 1 in the GRCh38/hg38 human reference genome list.

(SEQ ID NO: 65)
TTGATTTGTATATAGAATTAGATGATTCGGCTTATCATTTTAAAGCACT
AAATTGAAAGAGTGCCAGGAGTCAGGTTTTAACACTTCCCTAGCCAAAG
GAGCTAATTAAGC

[0189] SEQ ID NO: 66 is another example of a region where a branch point that can be involved in pseudo-exon-type aberrant splicing is present in the USH2A gene, and represents the base sequence of a region (39) from 215794716th to 215794606th bases (628733rd to 628843rd bases in SEQ ID NO: 26) in the base sequence of human chromosome 1 in the GRCh38/hg38 human reference genome list.

(SEQ ID NO: 66)
TAGAGTTTCTCATGGCATTCTACAGCTCTGCCAACTCTGATAATCATAG
TGGACTTAAGGAATAATAGTTTTACAAAGGAAAAAATATATCTTTTTAT
TCTCTTGACTTTC

[0190] SEQ ID NO: 67 is an example of a region where a branch point that can be involved in pseudo-exon-type aberrant splicing is present in the WRN gene, and represents the base sequence of a region (40) from 31108365th to 31108475th bases (74556th to 74666th bases in SEQ ID NO: 27) in the base sequence of human chromosome 8 in the GRCh38/hg38 human reference genome list.

(SEQ ID NO: 67)
CACTCTAGTTTATATATTTTAAATGTCATAAAATACCACATACTTATAA
GAGAAAAGGTTCTATTCATTGCTGAAGTGGAAGCTTATCATTAATTTTT
ATTTATTTATTTT

[0191] In one or more non-limiting embodiments, the antisense oligonucleotide of the present disclosure is an antisense oligonucleotide including the base sequence represented by SEQ ID NO: 68, an antisense oligonucleotide including the base sequence represented by SEQ ID NO: 69, or an antisense oligonucleotide including the base sequence represented by SEQ ID NO: 70, and is preferably an antisense oligonucleotide consisting of the base sequence represented by SEQ ID NO: 68, an antisense oligonucleotide consisting of the base sequence represented by SEQ ID NO: 69, or an antisense oligonucleotide consisting of the base sequence represented by SEQ ID NO: 70.

[0192] In one or more embodiments, examples of the antisense oligonucleotide of the present disclosure include an antisense oligonucleotide having a base sequence of any of SEQ ID NOs: 68 to 70 with deletion, substitution, insertion, and/or addition of 1 to 5 bases, 1 to 4 bases, 1 to 3 bases, 1 or 2 bases, or 1 base and having activity capable of suppressing and/or correcting a pseudo-exon-type splicing defect caused by a mutation in the FKTN gene (c.647+2084G>T (chr9:105606576G>T)).

[0193] In one or more embodiments, examples of the antisense oligonucleotide of the present disclosure include an antisense oligonucleotide having a base sequence with at least 80%, at least 85%, at least 90%, at least 91%, at least 92%, at least 93%, at least 94%, at least 95%, at least 96%, at least 97%, at least 98%, at least 99%, or 100% sequence identity to any of the base sequence of SEQ ID NOs: 68 to 70 and having activity capable of suppressing and/or correcting a pseudo-exon-type splicing defect caused by the mutation in the FKTN gene (c.647+2084G>T (chr9:105606576G>T)).

[0194] In one or more embodiments, examples of the antisense oligonucleotide of the present disclosure include an antisense oligonucleotide having a base sequence represented by SEQ ID NO: 68 with deletion, substitution, insertion, and/or addition of 1 to 5 bases, 1 to 4 bases, 1 to 3 bases, 1 or 2 bases, or 1 base and capable of binding to its target sequence (the base sequence consisting of bases at positions 48321 to 48345 of SEQ ID NO: 14).

[0195] In one or more embodiments, examples of the antisense oligonucleotide of the present disclosure include an antisense oligonucleotide having a base sequence represented by SEQ ID NO: 69 with deletion, substitution, insertion, and/or addition of 1 to 5 bases, 1 to 4 bases, 1 to 3 bases, 1 or 2 bases, or 1 base and capable of binding to its target sequence (the base sequence consisting of bases at positions 48337 to 48361 of SEQ ID NO: 14).

[0196] In one or more embodiments, examples of the antisense oligonucleotide of the present disclosure include an antisense oligonucleotide having a base sequence represented by SEQ ID NO: 70 with deletion, substitution, insertion, and/or addition of 1 to 5 bases, 1 to 4 bases, 1 to 3 bases, 1 or 2 bases, or 1 base and capable of binding to its target sequence (the base sequence consisting of bases at positions 48349 to 48368 of SEQ ID NO: 14).

[0197] In one or more embodiments, examples of the antisense oligonucleotide of the present disclosure include an antisense oligonucleotide having a base sequence with at least 80%, at least 85%, at least 90%, at least 91%, at least 92%, at least 93%, at least 94%, at least 95%, at least 96%, at least 97%, at least 98%, at least 99%, or 100% sequence identity to the base sequence represented by SEQ ID NO: 68 and capable of binding to its target sequence (the base sequence consisting of bases at positions 48321 to 48345 of SEQ ID NO: 14).

[0198] In one or more embodiments, examples of the antisense oligonucleotide of the present disclosure include an antisense oligonucleotide having a base sequence with at least 80%, at least 85%, at least 90%, at least 91%, at least 92%, at least 93%, at least 94%, at least 95%, at least 96%, at least 97%, at least 98%, at least 99%, or 100% sequence identity to the base sequence represented by SEQ ID NO: 69 and capable of binding to its target sequence (the base sequence consisting of bases at positions 48337 to 48361 of SEQ ID NO: 14).

[0199] In one or more embodiments, examples of the antisense oligonucleotide of the present disclosure include an antisense oligonucleotide having a base sequence with at least 80%, at least 85%, at least 90%, at least 91%, at least 92%, at least 93%, at least 94%, at least 95%, at least 96%, at least 97%, at least 98%, at least 99%, or 100% sequence identity to the base sequence represented by SEQ ID NO: 70 and capable of binding to its target sequence (the base sequence consisting of bases at positions 48349 to 48368 of SEQ ID NO: 14).

[0200] In one or more non-limiting embodiments, the antisense oligonucleotide of the present disclosure is an antisense oligonucleotide including the base sequence represented by SEQ ID NO: 74, and is preferably an antisense oligonucleotide consisting of the base sequence represented by SEQ ID NO: 74.

[0201] In one or more embodiments, examples of the antisense oligonucleotide of the present disclosure include an antisense oligonucleotide having a base sequence of SEQ ID NO: 74 with deletion, substitution, insertion, and/or addition of 1 to 5 bases, 1 to 4 bases, 1 to 3 bases, 1 or 2 bases, or 1 base and having activity capable of suppressing and/or correcting a pseudo-exon-type splicing defect caused by a mutation in the CFTR gene (c.3849+12191C>T (chr7:117639961C>T)).

[0202] In one or more embodiments, examples of the antisense oligonucleotide of the present disclosure include an antisense oligonucleotide having a base sequence with at least 80%, at least 85%, at least 90%, at least 91%, at least 92%, at least 93%, at least 94%, at least 95%, at least 96%, at least 97%, at least 98%, at least 99%, or 100% sequence identity to the base sequence of SEQ ID NO: 74 and having activity capable of suppressing and/or correcting a pseudo-exon-type splicing defect caused by the mutation in the CFTR gene (c.3849+12191C>T (chr7:117639961C>T)).

[0203] In one or more embodiments, examples of the antisense oligonucleotide of the present disclosure include DNA strands, RNA strands, and DNA-RNA hybrid strands. In one or more embodiments, the antisense oligonucleotide of the present disclosure may be an oligodeoxyribonucleotide, an oligoribonucleotide, a chimeric oligonucleotide composed of a deoxyribonucleotide and a ribonucleotide, or the like.

[0204] In one or more embodiments, the antisense oligonucleotide of the present disclosure may include a chemically modified oligonucleotide. In one or more embodiments, examples of chemical modification include modification of phosphorus atoms (substitution of oxygen atoms in diester linkage of phosphate moieties) and modification (conjugation) in nucleoside sugar moieties. In one or more embodiments, examples of the modification of phosphorus atoms include phosphorothioate modification, boranophosphate modification, methylphosphonate modification, and phosphorodithioate modification. In one or more embodiments, examples of the modification in nucleoside sugar moieties include ribose 2′modifications, such as 2′-O-methoxyethyl (2′-MOE), 2′-O-methyl (2′-OMe), and 2′-fluoro (2′-F).

[0205] In one or more embodiments, the antisense oligonucleotide of the present disclosure may include a nucleotide analogue and/or a spacer. In one or more embodiments, examples of the nucleotide analogue include morpholino backbones, carbamate backbones, siloxane backbones, sulfide backbones, sulfoxide backbones, sulfone backbones, formacetyl backbones, thioformacetyl backbones, methylene formacetyl backbones, riboacetyl backbone, alkene-containing backbones, sulfamate backbones, sulfonate backbones, sulfonamide backbones, methyleneimino backbones, methylenehydrazino backbones, and amide backbones.

[0206] In one or more embodiments, the antisense oligonucleotide of the present disclosure can be produced using a known genetic engineering method, chemical synthesis method, or the like.

### Method for Producing Antisense Oligonucleotide

[0207] Still another aspect of the present disclosure relates to a method for producing an antisense oligonucleotide for correcting pseudo-exon-type aberrant splicing. The antisense oligonucleotide production method of the present disclosure includes producing a base sequence complementary to a target sequence that includes a branch point in pseudo-exon-type aberrant splicing and consists of 10 to 50 bases.

[0208] In one or more embodiments, the antisense oligonucleotide production method of the present disclosure may include: measuring, with respect to obtained base sequences, activity for suppressing pseudo-exon-type aberrant splicing in which the branch point included in the target sequence is involved and/or efficiency of suppressing the pseudo-exon-type aberrant splicing; and based on the thus-measured activities and/or efficiencies, selecting a base sequence (antisense oligonucleotide) exhibiting the activity and/or efficiency exceeding a predetermined threshold value.

[0209] In one or more embodiments, the antisense oligonucleotide production method of the present disclosure may include determining a target sequence that includes a branch point in pseudo-exon-type aberrant splicing. The target sequence used in the production method of the present disclosure includes a branch point in pseudo-exon-type aberrant splicing. In one or more embodiments, the target sequence used in the production method of the present disclosure is a base sequence that includes a branch point in pseudo-exon-type aberrant splicing and consists of 10 to 50 successive bases in any of the above-described regions (1) to (40). In one or more embodiments, examples of the branch point include those described above.

[0210] In one or more embodiments, the length of the target sequence is 10 to 50 bases. In one or more embodiments, the length of the target sequence is 11 bases or more, 12 bases or more, 13 bases or more, 14 bases or more, or 15 bases or more. In one or more embodiments, the length of the antisense oligonucleotide is 45 bases or less, 40 bases or less, 39 bases or less, 38 bases or less, 37 bases or less, 36 bases or less, 35 bases or less, 34 bases or less, 33 bases or less, 32 bases or less, 30 bases or less, 29 bases or less, 28 bases or less, 27 bases or less, 26 bases or less, or 25 bases or less.

[0211] In one or more embodiments, the base sequence complementary to the target sequence need not necessarily be perfectly complementary to the target sequence. In one or more embodiments, the base sequence complementary to the target sequence may include mismatches to the extent that the base sequence can form a hybrid with the target sequence and can suppress pseudo-exon-type aberrant splicing in which the branch point included in the target sequence is involved. In one or more embodiments, the number of mismatch bases that may be included in the base sequence is 1, 2, 3, 4, 5, 6, 7, 8, 9, or 10.

[0212] In one or more embodiments, the base sequence complementary to the target sequence need only be such that at least 40% of bases of the base sequence to be produced are complementary to the target sequence, and preferably at least 45%, at least 50%, at least 55%, at least 60%, at least 65%, at least 70%, at least 75%, at least 80%, at least 85%, at least 90%, at least 91%, at least 92%, at least 93%, at least 94%, at least 95%, at least 96%, at least 97%, at least 98%, at least 99%, or 100% of bases of the base sequence to be produced are complementary to the target sequence.

[0213] In one or more embodiments, the length of the base sequence (antisense oligonucleotide) produced by the production method of the present disclosure is 10 bases to 50 bases. In one or more embodiments, the length of the antisense oligonucleotide is 11 bases or more, 12 bases or more, 13 bases or more, 14 bases or more, or 15 bases or more. In one or more embodiments, the length of the antisense oligonucleotide is 45 bases or less, 40 bases or less, 39 bases or less, 38 bases or less, 37 bases or less, 36 bases or less, 35 bases or less, 34 bases or less, 33 bases or less, 32 bases or less, 30 bases or less, 29 bases or less, 28 bases or less, 27 bases or less, 26 bases or less, or 25 bases or less. In one or more non-limiting embodiments, the length of the antisense oligonucleotide is preferably 15 bases to 30 bases.

[0214] In one or more non-limiting embodiments, examples of a base sequence obtained in the step of producing the base sequence complementary to the target sequence include a base sequence having 1 to 5 mismatch bases relative to the target sequence excluding the branch point and predicted to bind to less than 20 off-targets. The base sequence may be a base sequence having 1 to 4 mismatch bases and predicted to bind to less than 10 off-targets, or a base sequence having 1 to 3 mismatch bases and predicted to bind to 5 or less off-targets. In one or more embodiments, the length of such a base sequence is 15 bases to 30 bases and is preferably 25 bases.

[0215] In one or more embodiments, the antisense oligonucleotide production method of the present disclosure may include determining a target sequence. In one or more embodiments, the antisense oligonucleotide production method of the present disclosure may include determining a branch point to be included in a target sequence and determining the target sequence based on the thus-determined branch point. In one or more embodiments, the target sequence can be designed based on a disease of interest and/or the base sequence of a genomic DNA, cDNA, pre-mRNA, or mRNA of a gene.

[0216] In one or more non-limiting embodiments, the production method of the present disclosure can produce an antisense oligonucleotide for correcting pseudo-exon-type splicing defects caused by the above-described mutations (variants). The branch point included in the target sequence is as described above.

### Pharmaceutical Composition

[0217] Still another aspect of the present disclosure relates to a pharmaceutical composition containing the antisense oligonucleotide of the present disclosure as an active ingredient. In one or more embodiments, the pharmaceutical composition of the present disclosure is capable of correcting pseudo-exon-type aberrant splicing. In one or more embodiments, the pharmaceutical composition of the present disclosure can be used for preventing, treating, and/or ameliorating the development of a disease caused by pseudo-exon-type aberrant splicing. In one or more embodiments, examples of the disease caused by pseudo-exon-type aberrant splicing include those described above.

[0218] In the present disclosure, “treatment” refers to alleviating and/or removing a disease, illness, or disorder that a subject already has or symptoms caused thereby. In the present disclosure, “prevention of the development” refers to preventing a subject from having a disease, illness, or disorder.

[0219] In one or more embodiments, the pharmaceutical composition of the present disclosure contains the antisense oligonucleotide of the present disclosure, and may further contain a pharmaceutically acceptable carrier, antiseptic agent, diluent, excipient, and/or any other pharmaceutically acceptable ingredient.

[0220] In one or more embodiments, the content of the antisense oligonucleotide of the present disclosure as the active ingredient in the pharmaceutical composition of the present disclosure can be determined as appropriate according to the dosage form, administration method, carrier, and the like. In one or more embodiments, the amount of the antisense oligonucleotide of the present disclosure with respect to the total amount of formulation may be 0.01% to 100% (w/w), 0.1% to 95% (w/w), or the like.

[0221] In one or more embodiments, the pharmaceutical composition of the present disclosure can be processed into a dosage form suitable for an administration form by applying a well-known formulation technique. In one or more embodiments, examples of the administration form include oral administration and parenteral administration. In one or more embodiments, the formulation for oral administration may have a dosage form such as a tablet, capsule, granule, powder medicine, pill, troche, syrup, or a liquid medicine (e.g., a solution or suspension). In one or more embodiments, the formulation for parenteral administration may be an injectable, aerosol, or the like. In one or more embodiments, these formulations can be produced by a well-known method using additives. In one or more embodiments, examples of the additives include excipients, lubricants, binders, disintegrants, stabilizers, taste and odor masking agents, and diluents.

[0222] In one or more embodiments, examples of the excipients include various starches such as starch, potato starch, and corn starch, lactose, crystalline celluloses, and calcium hydrogen phosphate. In one or more embodiments, examples of the lubricants include ethyl cellulose, shellac, talc, carnauba wax, and paraffin. In one or more embodiments, examples of the binders include polyvinylpyrrolidone, macrogol, hydroxypropyl cellulose, hydroxypropyl methylcellulose, and the same compounds as those given as examples of the excipients. In one or more embodiments, examples of the disintegrants include the same compounds as those given as examples of the excipients, as well as chemically modified starches and celluloses, such as croscarmellose sodium, sodium carboxymethyl starch, and cross-linked polyvinylpyrrolidone. In one or more embodiments, examples of the stabilizer include: p-hydroxybenzoic acid esters such as methylparaben and propylparaben; alcohols such as chlorobutanol, benzyl alcohol, and phenylethyl alcohol; benzalkonium chloride; various phenols such as phenol and cresol; thimerosal; dehydroacetic acid; and sorbic acid. In one or more embodiments, examples of the taste and odor masking agents include commonly used sweeteners, acidulants, and flavors.

[0223] In one or more embodiments, a liquid medicine for oral administration can be produced using, for example, ethanol, phenol, chlorocresol, purified water, and/or distilled water as a solvent, and when necessary, a surfactant, preservative, tonicity agent, pH adjuster, emulsifying agent, and/or the like can also be used. In one or more embodiments, the liquid medicine for oral administration may further contain a solubilizer, wetting agent, suspending agent, sweetening agent, taste masking agent, aromatic agent, and antiseptic agent.

[0224] An injectable for parenteral administration may be a sterile aqueous or non-aqueous liquid, suspension, or emulsion. In one or more embodiments, an aqueous solvent for the injectable may be distilled water or physiological saline. In one or more embodiments, a non-aqueous solvent for the injectable may be a vegetable oil, an alcohol, and/or polysorbate 80 (pharmacopeia name). Examples of the vegetable oil include propylene glycol, polyethylene glycol, and olive oil. Examples of the alcohol include ethanol. In one or more embodiments, the injectable may further contain a tonicity agent, antiseptic agent, wetting agent, emulsifying agent, dispersant, stabilizer, dissolution assisting agent, and/or the like. In one or more embodiments, such a formulation may be sterilized by filtration through a bacteria-retaining filter, blending of a bactericide, or irradiation. Alternatively, a sterile solid composition may be dissolved or suspended in sterile water or a sterile solvent for injectable before use, and the thus-obtained composition may be used as such a formulation.

[0225] In one or more embodiments, the pharmaceutical composition of the present disclosure may be administered in the form of a non-viral vector or viral vector. Besides, a method of introducing the pharmaceutical composition using a liposome, a microinjection method, a method of transferring the antisense oligonucleotide into cells together with a carrier using a gene gun, an ultrasonic introduction method, and the like may be used in combination to administer the pharmaceutical composition of the present disclosure.

[0226] The method of using the pharmaceutical composition of the present disclosure may vary depending on symptoms, age, administration method, and the like. In one or more embodiments, the pharmaceutical composition of the present disclosure may be administered intermittently or continuously by oral, transdermal, submucosal, subcutaneous, intramuscular, intravascular, intracerebral, or intraperitoneal administration in such a manner that the body concentration of the antisense oligonucleotide of the present disclosure as the active ingredient would be between 100 pM to 1 mM inclusive. As a non-limiting embodiment, in the case of oral administration, the pharmaceutical composition of the present disclosure may be administered to a subject (an adult in the case of a human) at a dose of 0.01 mg/kg body weight to 2000 mg/kg body weight, 0.1 mg/kg body weight to 500 mg/kg body weight, or 0.1 mg/kg body weight to 100 mg/kg body weight per day in terms of the amount of the antisense oligonucleotide of the present disclosure, either as a single dose or divided into multiple doses, according to the symptoms of the subject. As a non-limiting embodiment, in the case of intravenous administration, the pharmaceutical composition of the present disclosure may be administered to a subject (an adult in the case of a human) at a dose of 0.001 mg/kg body weight to 50 mg/kg body weight or 0.01 mg/kg body weight to 50 mg/kg body weight per day, either as a single dose or divided into multiple doses, according to the symptoms of the subject.

[0227] Method for Correcting Pseudo-exon-type Aberrant Splicing Still another aspect of the present disclosure relates to a method for correcting pseudo-exon-type aberrant splicing using an antisense oligonucleotide having a base sequence capable of binding to a sequence including a branch point in pseudo-exon-type aberrant splicing. In one or more embodiments, the correction method of the present disclosure includes administering an effective amount of the antisense oligonucleotide of the present disclosure to a subject in need thereof. In one or more embodiments, the subject may be a patient having a mutation that can cause pseudo-exon-type aberrant splicing. In one or more embodiments, examples of the mutation that can cause pseudo-exon-type aberrant splicing include gene mutations (variants) described above or shown in FIG. 1.

### Treatment Method

[0228] Still another aspect of the present disclosure relates to a method for treating a disease caused by pseudo-exon-type aberrant splicing, including administering to a subject an antisense oligonucleotide having a base sequence capable of binding to a sequence that includes a branch point in pseudo-exon-type aberrant splicing. In one or more embodiments, the treatment method of the present disclosure includes administering a therapeutically effective amount of the antisense oligonucleotide of the present disclosure to a patient in need thereof.

[0229] In the present disclosure, the “therapeutically effective amount” refers to an amount to be administered to a patient, sufficient for correcting pseudo-exon-type aberrant splicing and/or for treating a disease resulting from pseudo-exon-type aberrant splicing treating.

[0230] In one or more embodiments, the subject may be a patient having a mutation that can cause pseudo-exon-type aberrant splicing. In one or more embodiments, examples of the mutation that can cause pseudo-exon-type aberrant splicing include gene mutations (variants) described above or shown in FIG. 1.

[0231] In one or more embodiments, examples of the disease caused by pseudo-exon-type aberrant splicing include those described above.

[0232] Still another aspect of the present disclosure relates to use of the antisense oligonucleotide of the present disclosure in production of a pharmaceutical composition for treating and/or preventing a disease caused by pseudo-exon-type aberrant splicing.

[0233] The present disclosure further relates to one or more non-limiting embodiments to be described below.

[1] An antisense oligonucleotide for correcting pseudo-exon-type aberrant splicing, having a base sequence capable of binding to a sequence that includes a branch point in pseudo-exon-type aberrant splicing.
[2] The antisense oligonucleotide according to [1], wherein
[0234] the pseudo-exon-type aberrant splicing is aberrant splicing caused by recognition of a non-coding region as a pseudo-exon, and
[0235] the branch point is an adenine base.
   [3] The antisense oligonucleotide according to [1] or [2] for inducing and/or promoting skipping of the pseudo-exon by binding to the sequence including the branch point.
   [4] The antisense oligonucleotide according to any one of [1] to [3], wherein
[0236] the branch point is an adenine base located upstream of a 3′-splice site of an intron.
   [5] The antisense oligonucleotide according to any one of [1] to [4], wherein
[0237] the branch point is an adenine base located in a region from 10 to 120 bases upstream of a 3′-splice site of an intron.
   [6] The antisense oligonucleotide according to any one of [1] to [5], consisting of 10 to 50 bases.
   [7] An antisense oligonucleotide including a base sequence capable of binding to a target sequence consisting of 10 to 50 successive bases in a region selected from the group consisting of the following regions (1) to (40), an antisense oligonucleotide including a base sequence capable of binding to a target sequence consisting of 10 to 50 successive bases in a region selected from the group consisting of the following regions (1) to (23) and (25) to (40), or an antisense oligonucleotide including a base sequence capable of binding to a target sequence consisting of 10 to 50 successive bases in the following region (19),
[0238] wherein the base sequence includes a branch point in pseudo-exon-type aberrant splicing:
   (1) a region that is in an ABCA4 gene and corresponds to a region from 94084339th to 94084229th bases (SEQ ID NO: 28) in a base sequence of human chromosome 1 in a GRCh38/hg38 human reference genome list;
   (2) a region that is in the ABCA4 gene and corresponds to a region from 94081341st to 94081231st bases (SEQ ID NO: 29) in the base sequence of human chromosome 1 in the GRCh38/hg38 human reference genome list;
   (3) a region that is in the ABCA4 gene and corresponds to a region from 94062301st to 94062191st bases (SEQ ID NO: 30) in the base sequence of human chromosome 1 in the GRCh38/hg38 human reference genome list;
   (4) a region that is in the ABCA4 gene and corresponds to a region from 94028532nd to 94028422nd bases (SEQ ID NO: 31) in the base sequence of human chromosome 1 in the GRCh38/hg38 human reference genome list;
   (5) a region that is in the ABCA4 gene and corresponds to a region from 94028576th to 94028466th bases (SEQ ID NO: 32) in the base sequence of human chromosome 1 in the GRCh38/hg38 human reference genome list;
   (6) a region that is in the ABCA4 gene and corresponds to a region from 94027674th to 94027564th bases (SEQ ID NO: 33) in the base sequence of human chromosome 1 in the GRCh38/hg38 human reference genome list;
   (7) a region that is in an ABCC8 gene and corresponds to a region from 17444521st to 17444411th bases (SEQ ID NO: 34) in a base sequence of human chromosome 11 in the GRCh38/hg38 human reference genome list;
   (8) a region that is in an APC gene and corresponds to a region from 112790393rd to 112790503rd bases (SEQ ID NO: 35) in a base sequence of human chromosome 5 in the GRCh38/hg38 human reference genome list;
   (9) a region that is in the APC gene and corresponds to a region from 112822518th to 112822628th bases (SEQ ID NO: 36) in the base sequence of human chromosome 5 in the GRCh38/hg38 human reference genome list;
   (10) a region that is in the APC gene and corresponds to a region from 112779563rd to 112779673rd bases (SEQ ID NO: 37) in the base sequence of human chromosome 5 in the GRCh38/hg38 human reference genome list;
   (11) a region that is in an ATM gene and corresponds to a region from 108270351st to 108270461st bases (SEQ ID NO: 38) in the base sequence of human chromosome 11 in the GRCh38/hg38 human reference genome list;
   (12) a region that is in the ATM gene and corresponds to a region from 108308849th to 108308959th bases (SEQ ID NO: 39) in the base sequence of human chromosome 11 in the GRCh38/hg38 human reference genome list;
   (13) a region that is in a BRCA1 gene and corresponds to a region from 43087074th to 43086964th bases (SEQ ID NO: 40) in a base sequence of human chromosome 17 in the GRCh38/hg38 human reference genome list;
   (14) a region that is in a BRCA2 gene and corresponds to a region from 32345028th to 32345138th bases (SEQ ID NO: 41) in a base sequence of human chromosome 13 in the GRCh38/hg38 human reference genome list;
   (15) a region that is in a BRIP1 gene and corresponds to a region from 61/782,587th to 61/782,477th bases (SEQ ID NO: 42) in the base sequence of human chromosome 17 in the GRCh38/hg38 human reference genome list;
   (16) a region that is in a CEP290 gene and corresponds to a region from 88101435th to 88101325th bases (SEQ ID NO: 43) in a base sequence of human chromosome 12 in the GRCh38/hg38 human reference genome list;
   (17) a region that is in a CFTR gene and corresponds to a region from 117578099th to 117578209th bases (SEQ ID NO: 44) in a base sequence of human chromosome 7 in the GRCh38/hg38 human reference genome list;
   (18) a region that is in the CFTR gene and corresponds to a region from 117589298th to 117589408th bases (SEQ ID NO: 45) in the base sequence of human chromosome 7 in the GRCh38/hg38 human reference genome list;
   (19) a region that is in the CFTR gene and corresponds to a region from 117639756th to 117639866th bases (SEQ ID NO: 46) in the base sequence of human chromosome 7 in the GRCh38/hg38 human reference genome list;
   (20) a region that is in a CLRN1 gene and corresponds to a region from 150942759th to 150942649th bases (SEQ ID NO: 47) in a base sequence of human chromosome 3 in the GRCh38/hg38 human reference genome list;
   (21) a region that is in a CNGB3 gene and corresponds to a region from 86605573rd to 86605463rd bases (SEQ ID NO: 48) in a base sequence of human chromosome 8 in the GRCh38/hg38 human reference genome list;
   (22) a region that is in a COL6A1 gene and corresponds to a region from 45989774th to 45989884th bases (SEQ ID NO: 49) in a base sequence of human chromosome 21 in the GRCh38/hg38 human reference genome list;
   (23) a region that is in a DYSF gene and corresponds to a region from 71661602nd to 71661712th bases (SEQ ID NO: 50) in a base sequence of human chromosome 2 in the GRCh38/hg38 human reference genome list;
   (24) a region that is in a FKTN gene and corresponds to a region from 105606387th to 105606497th bases (SEQ ID NO: 51) in a base sequence of human chromosome 9 in the GRCh38/hg38 human reference genome list;
   (25) a region that is in a GAA gene and corresponds to a region from 80104281st to 80104391st bases (SEQ ID NO: 52) in the base sequence of human chromosome 17 in the GRCh38/hg38 human reference genome list;
   (26) a region that is in a GALT gene and corresponds to a region from 34649835th to 34649945th bases (SEQ ID NO: 53) in the base sequence of human chromosome 9 in the GRCh38/hg38 human reference genome list;
   (27) a region that is in a GHR gene and corresponds to a region from 42700567th to 42700677th bases (SEQ ID NO: 54) in the base sequence of human chromosome 5 in the GRCh38/hg38 human reference genome list;
   (28) a region that is in a GLA gene and corresponds to a region from 101399920th to 101399810th bases (SEQ ID NO: 55) in a base sequence of human chromosome X in the GRCh38/hg38 human reference genome list;
   (29) a region that is in an HADH gene and corresponds to a region from 108023829th to 108023939th bases (SEQ ID NO: 56) in a base sequence of human chromosome 4 in the GRCh38/hg38 human reference genome list;
   (30) a region that is in an HBB gene and corresponds to a region from 5226117th to 5226007th bases (SEQ ID NO: 57) in the base sequence of human chromosome 11 in the GRCh38/hg38 human reference genome list;
   (31) a region that is in an LDLR gene and corresponds to a region from 11120250th to 11120360th bases (SEQ ID NO: 58) in a base sequence of human chromosome 19 in the GRCh38/hg38 human reference genome list;
   (32) a region that is in the LDLR gene and corresponds to a region from 11122702nd to 11122812th bases (SEQ ID NO: 59) in the base sequence of human chromosome 19 in the GRCh38/hg38 human reference genome list;
   (33) a region that is in an MYBPC3 gene and corresponds to a region from 47343432nd to 47343322nd bases (SEQ ID NO: 60) in the base sequence of human chromosome 11 in the GRCh38/hg38 human reference genome list;
   (34) a region that is in a PKHD1 gene and corresponds to a region from 51882676th to 51882566th bases (SEQ ID NO: 61) in a base sequence of human chromosome 6 in the GRCh38/hg38 human reference genome list;
   (35) a region that is in an RPGRIP1 gene and corresponds to a region from 21320889th to 21320999th bases (SEQ ID NO: 62) in a base sequence of human chromosome 14 in the GRCh38/hg38 human reference genome list;
   (36) a region that is in an SLC12A3 gene and corresponds to a region from 56883499th to 56883609th bases (SEQ ID NO: 63) in a base sequence of human chromosome 16 in the GRCh38/hg38 human reference genome list;
   (37) a region that is in the SLC12A3 gene and corresponds to a region from 56893096th to 56893206th bases (SEQ ID NO: 64) in the base sequence of human chromosome 16 in the GRCh38/hg38 human reference genome list;
   (38) a region that is in a USH2A gene and corresponds to a region from 215891470th to 215891360th bases (SEQ ID NO: 65) in the base sequence of human chromosome 1 in the GRCh38/hg38 human reference genome list;
   (39) a region that is in the USH2A gene and corresponds to a region from 215794716th to 215794606th bases (SEQ ID NO: 66) in the base sequence of human chromosome 1 in the GRCh38/hg38 human reference genome list; and
   (40) a region that is in a WRN gene and corresponds to a region from 31108365th to 31108475th bases (SEQ ID NO: 67) in the base sequence of human chromosome 8 in the GRCh38/hg38 human reference genome list.
   [8] A pharmaceutical composition for correcting pseudo-exon-type aberrant splicing, including the antisense oligonucleotide according to any one of [1] to [7] as an active ingredient.
   [9] A pharmaceutical composition for preventing or treating the development of a disease caused by pseudo-exon-type aberrant splicing, including the antisense oligonucleotide according to any one of [1] to [7] as an active ingredient.
   [10] The pharmaceutical composition according to [9], wherein
[0239] the disease is at least one selected from the group consisting of Stargardt disease; hyperinsulinemic hypoglycemia, familial; familial adenomatous polyposis; ataxia-telangiectasia; breast-ovarian cancer, familial; breast cancer, early-onset, susceptibility to; Leber congenital amaurosis; cystic fibrosis; Usher syndrome; achromatopsia; Ullrich congenital muscular dystrophy; muscular dystrophy, limb-girdle, autosomal recessive; Fukuyama congenital muscular dystrophy; Pompe disease; galactosemia; Laron dwarfism; Fabry disease; beta-thalassemia; hypercholesterolemia, familial; familial hypertrophic cardiomyopathy; autosomal recessive polycystic kidney disease; Gitelman syndrome; and Werner syndrome.
   [11] A method for correcting pseudo-exon-type aberrant splicing using an antisense oligonucleotide having a base sequence capable of binding to a sequence that includes a branch point in pseudo-exon-type aberrant splicing.
   [12] The method according to [11], wherein
[0240] the antisense oligonucleotide is the antisense oligonucleotide according to any one of [1] to [7].
   [13] A method for treating a disease caused by pseudo-exon-type aberrant splicing, including administering to a subject an antisense oligonucleotide having a base sequence capable of binding to a sequence that includes a branch point in pseudo-exon-type aberrant splicing.
   [14] The method according to [13], wherein
[0241] the antisense oligonucleotide is the antisense oligonucleotide according to any one of [1] to [7].
   [15] The method according to [13] or [14], wherein
[0242] the disease is the disease specified in [10].
   [16] A method for producing an antisense oligonucleotide for correcting pseudo-exon-type aberrant splicing, including producing a base sequence complementary to a target sequence that includes a branch point in pseudo-exon-type aberrant splicing and consists of 10 to 50 bases.
   [17] The method according to [16], wherein
[0243] the antisense oligonucleotide is the antisense oligonucleotide according to any one of [1] to [7].
   [18] The method according to [16] or [17], wherein
[0244] the target sequence consists of 10 to 50 successive bases in a region selected from the group consisting of the regions (1) to (40) specified in [7], 10 to 50 successive bases in a region selected from the group consisting of the regions (1) to (23) and (25) to (40) specified in [7], or 10 to 50 successive bases in the region (19) specified in [7].

[0245] The present disclosure will be described below in further detail by way of Examples. It is to be noted that these Examples are merely illustrative, and the present disclosure is not limited thereto.

### BRIEF DESCRIPTION OF DRAWINGS

[0246] FIG. 1 shows target diseases and target genes of the antisense oligonucleotide of the present disclosure, and mutations that can cause pseudo-exon-type aberrant splicing.

[0247] FIG. 2 illustrates design of antisense oligonucleotides (AONs) targeted to a branch point located upstream of a pseudo-exon in the Example.

[0248] FIG. 3 shows results obtained in the Example demonstrating the effects of the branch point-targeted antisense oligonucleotides (AONs 1, 2 and 3) on patient-derived myotubes. FIG. 3 shows results of RT-PCR.

[0249] FIG. 4 shows results of Western blotting performed in the Example.

[0250] FIG. 4 shows glycosylated α-DG from patient-derived myotubes treated with 100 nM of the antisense oligonucleotide 1 (AON 1) or mock-treated. β-DG was used as a loading control. In the graph, data are shown as mean±SD (n=4), and “**” indicates that the statistical significance p<0.01 calculated by t-test using Welch Two Sample t-test.

[0251] FIG. 5 shows results of immunofluorescent staining performed in the Example. FIG. 5 shows α-DG glycosylation (clone: IIH6) and myosin heavy chains (MHCs) (clone: MF20) in the patient-derived myotubes after treatment with 100 nM of the antisense oligonucleotide 1 (AON 1) or a mock treatment. The scale bar represents 50 μm. In the graphs, data are shown as mean±SD (n=4), and “**” indicates that the statistical significance p<0.01 calculated by t-test using Welch Two Sample t-test.

[0252] FIGS. 6A and 6B illustrate identification of branch points. FIG. 6A schematically shows divergent primers for a lariat intron in a FKTN splicing reporter upstream of a pseudo-exon. P denotes a pseudo-exon, and A denotes a branch point. FIG. 6B illustrates branch points detected by TA cloning and Sanger sequencing, and the main branch point was found to be adenosine located 38 bp from the pseudo-exon (P).

[0253] FIG. 7 is a schematic diagram showing a FKTN-mutated reporter and a mutated (#BP_M) reporter, which is the FKTN-mutated reporter with a point mutation. The mutated (#BP_M) reporter has a point mutation (c.647+1977A>T) resulting from substitution of the adenine base as the main branch point with a thymine base. RT-PCR analysis revealed skipping of the pseudo-exon in the mutated (#BP_M) reporter.

[0254] FIG. 8 illustrates pseudo-exon-type aberrant splicing in FKTN with a homozygous SVA retrotransposon insertion and design of an antisense oligonucleotide targeted to a branch point. Primers for an aberrant RT-PCR product (black arrows) and primers for a corrected RT-PCR product (gray arrows) are schematically shown.

[0255] FIG. 9 shows results obtained in the Example demonstrating the effects of a branch point-targeted antisense oligonucleotide on myotubes derived from patients with a homozygous SVAretrotransposon insertion. FIG. 9 shows RT-PCR analysis after treatment with an antisense oligonucleotide 4 (SVAAON) (30 nM, 100 nM or 300 nM) or a mock treatment. B2-microglobulin was used as a loading control.

[0256] FIG. 10 shows results obtained in the Example demonstrating the effects of the branch point-targeted antisense oligonucleotide 4 (SVAAON) on the myotubes derived from the patients with a homozygous SVA retrotransposon insertion. FIG. 10 shows results of RT-qPCR quantification of aberrant splicing and corrected splicing. In the graphs, data are shown as mean±SD (n=4), and “**” indicates that the statistical significance p<0.01 calculated by t-test using Welch Two Sample t-test.

[0257] FIG. 11 shows results obtained in the Example demonstrating the effects of the branch point-targeted antisense oligonucleotide on the myotubes derived from the patients with a homozygous SVAretrotransposon insertion. FIG. 11 shows results of Western blotting with respect to glycosylated α-DG treated with 100 nM of the antisense oligonucleotide 4 (SVAAON) or mock-treated. α-DG was used as a loading control. In the graph, data are shown as mean±SD (n=4), and “**” indicates that the statistical significance p<0.01 calculated by t-test using Welch Two Sample t-test.

[0258] FIG. 12 shows results of immunofluorescence staining performed in the Example showing the effect of the branch point-targeted antisense oligonucleotide in the myotubes derived from the patients with a homozygous SVAretrotransposon insertion. FIG. 12 shows α-DG glycosylation (clone: IIH6) and myosin heavy chains (MHCs) (clone: MF20) in the patient-derived myotubes after treatment with 100 nM of the antisense oligonucleotide 4 (SVAAON) or a mock treatment. The scale bar represents 50 μm. In the graphs, data are shown as mean±SD (n=4), and “**” indicates that the statistical significance p<0.01 calculated by t-test using Welch Two Sample t-test.

[0259] FIG. 13 shows pseudo-exon-type aberrant splicing that may occur in the CTFR (cystic fibrosis) gene.

[0260] FIG. 14 shows results obtained in the Example demonstrating the effects of a branch point-targeted antisense oligonucleotide in pseudo-exon-type aberrant splicing that may occur in the CTFR gene. FIG. 14 shows results of RT-PCR analysis after a treatment with an antisense oligonucleotide 5 (BP-AON) (30 nM or 100 nM) or a non-target antisense oligonucleotide (NC) or a mock treatment. The band at 336 bp indicates an aberrant RT-PCR product, and the band at 252 bp indicates a corrected RT-PCR product.

### EXAMPLES

### 1-1. Design of Branch Point-Targeted Antisense Oligonucleotides

[0261] The fukutin (FKTN) gene (SEQ ID NO: 14) is the gene responsible for Fukuyama congenital muscular dystrophy. A mutation (c.647+2084G>T (chr9:105606576G>T)) in the FKTN gene is the second most common haplotype of Fukuyama congenital muscular dystrophy. This mutation occurs in intron 6 and causes pseudo-exon-type aberrant splicing creating 64-bp pseudo-exon to be formed between exons 5 and 6.

[0262] Branch points involved in pseudo-exon-type aberrant splicing caused by the above-described mutation are normally located 120 to 10 bases upstream of the 3′-splice site. The branch points are generally adenosine. In order to determine the optimal target sequence for suppressing this pseudo-exon, three different antisense oligonucleotides were designed (FIG. 2). These antisense oligonucleotides cover all adenosines located within a range from 44 to 18 bases upstream of the pseudo-exon. The antisense oligonucleotides were synthesized using 2′-O-methyl phosphorothioate (Integrated DNA Technologies, Coralville, IA, USA).

Antisense oligonucleotide 1 (AON 1):
(SEQ ID NO: 68)
5′-CUAGGUUAGAAACUUCAUACUCCAA-3′
Antisense oligonucleotide 2 (AON 2):
(SEQ ID NO: 69)
5′-AAUAAAAGGAACAAUUCUAGGUUAG-3′
Antisense oligonucleotide 3 (AON 3):
(SEQ ID NO: 70)
5′-AAAGGAGAAUAAAAGGAACA-3′

[0263] The sequence identity of the thus-obtained antisense oligonucleotides 1 to 3 with their target sequences was examined. The antisense oligonucleotide 1 was perfectly complementary to its target sequence (TTGGAGTATGAAGTTTCTAACCTAG: positions 48321 to 48345 of SEQ ID NO: 14), the antisense oligonucleotide 2 was perfectly complementary to its target sequence (CTAACCTAGAATTGTTCCTTTTATT: positions 48337 to 48361 of SEQ ID NO: 14), and the antisense oligonucleotide 3 was perfectly complementary to its target sequence (TGTTCCTTTTATTCTCCTTT: positions 48349 to 48368 of SEQ ID NO: 14).

[0264] 1-2. The antisense oligonucleotides 1 to 3 restored correct splicing of the mutant allele and increased glycosylated α-dystroglycan expression in myotubes derived from patients with the c.647+2084G>T mutation.

[0265] Patient-derived myoblasts were transfected with each of the antisense oligonucleotides 1 to 3. The transfection was performed after culturing the myoblasts in a growth medium until 80% to 100% confluent, and thereafter, the medium was replaced with a differentiation medium to differentiate the myoblasts into myotubes. The antisense oligonucleotide concentration was set to 30 nM or 100 nM, and RNAiMaX Transfection Reagent (Thermo Fisher Scientific) and Opti-MEM (Thermo Fisher Scientific) were used as reagents.

[0266] Exons 5 to 10 were subjected to RT-PCR. The results thereof are shown in FIG. 3. P in FIG. 3 denotes “pseudo-exon”. In FIG. 3, the positions of a pseudo-exon-type aberrant splicing product including the pseudo-exon (P), a corrected splicing product, a splicing product including the pseudo-exon (P) and exhibiting skipping of exons 7 to 9, and a splicing product including no pseudo-exon but exhibiting skipping of exons 7 to 9 are shown from the top in this order. As can be seen from FIG. 3, the antisense oligonucleotides 1 to 3 (AONs 1 to 3) suppressed pseudo-exon-type aberrant splicing in a concentration-dependent manner and increased the correctly spliced transcript derived from the mutant allele without causing skipping of other exons. In particular, the antisense oligonucleotides 1 and 2 reduced the pseudo-exon-type aberrant splicing and increased the normal transcript more effectively than the antisense oligonucleotide 3.

[0267] Next, Western blotting and immunofluorescent staining were performed to examine whether the antisense oligonucleotide of the present disclosure restores a decrease in expression of glycosylated α-dystroglycan (α-DG), which is a basic symptom of Fukuyama congenital muscular dystrophy (FCMD). The antisense oligonucleotide 1 was used as the antisense oligonucleotide. The results thereof are shown in FIGS. 4 and 5. FIG. 4 shows the results of the Western blotting, and FIG. 5 shows the results of the immunofluorescence staining. As can be seen from FIGS. 4 and 5, treatment with the antisense oligonucleotide 1 increased the expression of glycosylated α-DG as compared with the case where the antisense oligonucleotide 1 was not added. In particular, a prominent increase in the expression was observed in the immunofluorescent staining. These results demonstrate that the antisense oligonucleotide of the present disclosure is capable of restoring basic FKTN expression in FCMD patients.

1-3. Identification of Branch Points from Lariat Introns

[0268] Whether the antisense oligonucleotide 1 regulated splicing by actually inhibiting the branch point was examined. In order to identify the branch point used for the pseudo-exon in FKTN-mRNA, a lariat intron in a FKTN splicing reporter was subjected to RT-PCR analysis. As shown in FIG. 6A, divergent primers for upstream of the pseudo-exon were designed in order to detect lariat introns across branch points, and RT-PCR products with the predicted size were detected. In 76% of RT-PCR products, adenosine located 38 bp upstream from the pseudo-exon (c.647+1977A, 48340th base in SEQ ID NO: 14) was used as the branch point, as shown in FIG. 6B. In order to examine whether pseudo-exon skipping is caused by inhibiting the branch point, a mutated (#BP_M) reporter having a point mutation (c.647+1977A>T) was produced (FIG. 7). HEK293 was transfected with a wild-type reporter, a mutated reporter, and the mutated (#BP_M) reporter, and the occurrence of pseudo-exon skipping in FKTN-mRNA was examined. As can be seen from FIG. 7, FKTN-mRNA derived from the mutated reporter included the pseudo-exon. On the other hand, FKTN-mRNA derived from the mutated (#BP_M) reporter did not include the pseudo-exon, as with FKTN-mRNAfrom the wild-type reporter.

[0269] Since the antisense oligonucleotides 1 and 2 include the branch point (c.647+1977A) used for the pseudo-exon in FKTN-mRNA, it can be said that these results demonstrate the antisense oligonucleotides 1 and 2 skip the pseudo-exon.

Reference Example: Design of an Antisense Oligonucleotide Targeted to a Branch Point in FCMD with a Homozygous SVA Retrotransposon Insertion

[0270] In order to evaluate whether branch point-targeted antisense oligonucleotides are also effective for mutations other than pseudo-exon mutations, an antisense oligonucleotide was designed for a SINE-VNTR-Alu (SVA) retrotransposon insertion mutation in FCMD. The SVAretrotransposon insertion occurs in the 3′-untranslated region (UTR) of the FKTN gene, and results in pseudo-exon-type aberrant splicing due to SVA exon trapping. There was only one adenosine located within a range from 18 to 44 bases upstream of the acceptor site. Thus, this adenosine was determined as the branch point, and from a region including this branch point (CTCCCTCTCCCTCTCCCTCCACTGTCTCCCTCTCCT: SEQ ID NO: 71), a target sequence (CCCTCTCCCTCCACTGTCTCCCTCT: SEQ ID NO: 72) was determined. Then, an antisense oligonucleotide 4 targeted to this branch point was designed (FIG. 8). The antisense oligonucleotide 4 was perfectly complementary to the target sequence (CCCTCTCCCTCCACTGTCTCCCTCT: SEQ ID NO: 72).

Antisense Oligonucleotide 4 (SVAAON):
(SEQ ID NO: 73)
5′-AGAGGGAGACAGUGGAGGGAGAGGG-3′

2. The Antisense Oligonucleotide 4 Rectifies Aberrant Splicing and α-Dystroglycan Glycosylation in Myotubes Derived from Patients with a Homozygous SVA Retrotransposon Insertion

[0271] Patient-derived myoblasts with a homozygous SVA retrotransposon insertion were transfected with the antisense oligonucleotide 4. The transfection was performed in the same manner as described in the item 1-2 above, except that the antisense oligonucleotide 4 was used and the concentration of the antisense oligonucleotide 4 was set to 30 nM, 100 nM, or 300 nM.

[0272] The results thereof are shown in FIG. 9. As can be seen from FIG. 9, the antisense oligonucleotide 4 suppressed pseudo-exon-type aberrant splicing in a dose-dependent manner and increased the number of correctly spliced transcripts derived from the mutant allele. RT-PCR was also performed to examine the effect of the antisense oligonucleotide 4. The results thereof are shown in FIG. 10. The antisense oligonucleotide 4 reduced the pseudo-exon-type aberrant splicing in a concentration-dependent manner, and reduced the pseudo-exon-type aberrant splicing to 56% at 300 nM. Also, the antisense oligonucleotide 4 increased a normal splicing product in a dose-dependent manner, and increased the number of correctly spliced products to 493% at 300 nM.

[0273] Next, Western blotting and immunofluorescent staining were performed to examine whether the antisense oligonucleotide of the present disclosure restores a decrease in expression of glycosylated α-dystroglycan (α-DG), which is a basic symptom of FCMD. The results thereof are shown in FIGS. 11 and 12. The Western blotting of glycosylated α-DG showed a significant shift toward a higher molecular weight as compared with the case without the treatment with the antisense oligonucleotide 4 (FIG. 11). The immunofluorescent staining showed a marked increase of glycosylated α-DG (FIG. 12). These results demonstrate that the branch point-targeted antisense oligonucleotide 4 is capable of restoring basic FKTN expression in FCMD patients.

3-1. Design of an Antisense Oligonucleotide Targeted to a Branch Point in Pseudo-Exon-Type Aberrant Splicing that May be Caused in the CTFR Gene

[0274] The CFTR gene (SEQ ID NO: 9) is a gene responsible for cystic fibrosis. A mutation (c.3849+12191C>T (chr7:117639961C>T)) in the CFTR gene occurs in intron 22, and causes 84-bp pseudo-exon to be formed between exons 22 and 23 (FIG. 13). An adenosine (chr7:117639851) located 10 bases upstream from the above-described mutation (c.3849+12191C>T (chr7:117639961C>T)) causing the pseudo-exon was determined as the branch point, and an antisense oligonucleotide 5 targeted to this branch point was designed and synthesized using 2′-O-methyl phosphorothioate (Integrated DNA Technologies, Coralville, IA, USA).

Antisense oligonucleotide 5 (BP-AON):
(SEQ ID NO: 74)
5′-GGUGAUUAUAAUUGAAUCUUUUAUG-3′

3-2. The Antisense Oligonucleotide 5 (BP-AON) Rectifies Aberrant Splicing in Undifferentiated iPS Cells Derived from Patients with the c.3849+12191C>T Mutation

[0275] First, undifferentiated iPS cells generated from patients with the c.3849+12191C>T mutation were prepared. Then, the undifferentiated iPS cells were cultured in a growth medium until 80% to 100% confluent, and then transfected with the antisense oligonucleotide 5. The cells were collected 24 hours later. The concentration of the antisense oligonucleotide 5 was set to 30 nM or 100 nM, and Lipofectamine Stem Transfection Reagent (Thermo Fisher Scientific) was used as a reagent (FIG. 14). Then, exons 22 to 23 were subjected to RT-PCR. As a control, the transfection was performed in the same manner using, instead of the antisense oligonucleotide 5, an antisense oligonucleotide (NC) for a non-target nucleic acid sequence.

[0276] The results thereof are shown in FIG. 14. As can be seen from FIG. 14, the antisense oligonucleotide 5 suppressed pseudo-exon-type aberrant splicing and increased a correctly spliced transcript. In addition, although the percentage of normal splicing product was about 27% in the mock control, the antisense oligonucleotide 5 could restore the number of correctly splicing products to 56%.

1. An antisense oligonucleotide for correcting pseudo-exon-type aberrant splicing, having a base sequence capable of binding to a sequence that includes a branch point in pseudo-exon-type aberrant splicing.

2. The antisense oligonucleotide according to claim 1, wherein
the pseudo-exon-type aberrant splicing is aberrant splicing caused by recognition of a non-coding region as a pseudo-exon, and
the branch point is an adenine base.

3. The antisense oligonucleotide according to claim 2 for inducing and/or promoting skipping of the pseudo-exon by binding to the sequence including the branch point.

4. The antisense oligonucleotide according to claim 1, wherein
the branch point is an adenine base located upstream of a 3′-splice site of an intron.

5. The antisense oligonucleotide according to claim 1, wherein
the branch point is an adenine base located in a region from 10 to 120 bases upstream of a 3′-splice site of an intron.

6. The antisense oligonucleotide according to claim 1, consisting of 10 to 50 bases.

7. An antisense oligonucleotide comprising a base sequence capable of binding to a target sequence consisting of 10 to 50 successive bases in a region selected from the group consisting of the following regions (1) to (40),
wherein the base sequence includes a branch point in pseudo-exon-type aberrant splicing:
(1) a region that is in an ABCA4 gene and corresponds to a region from 94084339th to 94084229th bases (SEQ ID NO: 28) in a base sequence of human chromosome 1 in a GRCh38/hg38 human reference genome list;
(2) a region that is in the ABCA4 gene and corresponds to a region from 94081341st to 94081231st bases (SEQ ID NO: 29) in the base sequence of human chromosome 1 in the GRCh38/hg38 human reference genome list;
(3) a region that is in the ABCA4 gene and corresponds to a region from 94062301st to 94062191st bases (SEQ ID NO: 30) in the base sequence of human chromosome 1 in the GRCh38/hg38 human reference genome list;
(4) a region that is in the ABCA4 gene and corresponds to a region from 94028532nd to 94028422nd bases (SEQ ID NO: 31) in the base sequence of human chromosome 1 in the GRCh38/hg38 human reference genome list;
(5) a region that is in the ABCA4 gene and corresponds to a region from 94028576th to 94028466th bases (SEQ ID NO: 32) in the base sequence of human chromosome 1 in the GRCh38/hg38 human reference genome list;
(6) a region that is in the ABCA4 gene and corresponds to a region from 94027674th to 94027564th bases (SEQ ID NO: 33) in the base sequence of human chromosome 1 in the GRCh38/hg38 human reference genome list;
(7) a region that is in an ABCC8 gene and corresponds to a region from 17444521st to 17444411th bases (SEQ ID NO: 34) in a base sequence of human chromosome 11 in the GRCh38/hg38 human reference genome list;
(8) a region that is in an APC gene and corresponds to a region from 112790393rd to 112790503rd bases (SEQ ID NO: 35) in a base sequence of human chromosome 5 in the GRCh38/hg38 human reference genome list;
(9) a region that is in the APC gene and corresponds to a region from 112822518th to 112822628th bases (SEQ ID NO: 36) in the base sequence of human chromosome 5 in the GRCh38/hg38 human reference genome list;
(10) a region that is in the APC gene and corresponds to a region from 112779563rd to 112779673rd bases (SEQ ID NO: 37) in the base sequence of human chromosome 5 in the GRCh38/hg38 human reference genome list;
(11) a region that is in an ATM gene and corresponds to a region from 108270351st to 108270461st bases (SEQ ID NO: 38) in the base sequence of human chromosome 11 in the GRCh38/hg38 human reference genome list;
(12) a region that is in the ATM gene and corresponds to a region from 108308849th to 108308959th bases (SEQ ID NO: 39) in the base sequence of human chromosome 11 in the GRCh38/hg38 human reference genome list;
(13) a region that is in a BRCA1 gene and corresponds to a region from 43087074th to 43086964th bases (SEQ ID NO: 40) in a base sequence of human chromosome 17 in the GRCh38/hg38 human reference genome list;
(14) a region that is in a BRCA2 gene and corresponds to a region from 32345028th to 32345138th bases (SEQ ID NO: 41) in a base sequence of human chromosome 13 in the GRCh38/hg38 human reference genome list;
(15) a region that is in a BRIP1 gene and corresponds to a region from 61/782,587th to 61/782,477th bases (SEQ ID NO: 42) in the base sequence of human chromosome 17 in the GRCh38/hg38 human reference genome list;
(16) a region that is in a CEP290 gene and corresponds to a region from 88101435th to 88101325th bases (SEQ ID NO: 43) in a base sequence of human chromosome 12 in the GRCh38/hg38 human reference genome list;
(17) a region that is in a CFTR gene and corresponds to a region from 117578099th to 117578209th bases (SEQ ID NO: 44) in a base sequence of human chromosome 7 in the GRCh38/hg38 human reference genome list;
(18) a region that is in the CFTR gene and corresponds to a region from 117589298th to 117589408th bases (SEQ ID NO: 45) in the base sequence of human chromosome 7 in the GRCh38/hg38 human reference genome list;
(19) a region that is in the CFTR gene and corresponds to a region from 117639756th to 117639866th bases (SEQ ID NO: 46) in the base sequence of human chromosome 7 in the GRCh38/hg38 human reference genome list;
(20) a region that is in a CLRN1 gene and corresponds to a region from 150942759th to 150942649th bases (SEQ ID NO: 47) in a base sequence of human chromosome 3 in the GRCh38/hg38 human reference genome list;
(21) a region that is in a CNGB3 gene and corresponds to a region from 86605573rd to 86605463rd bases (SEQ ID NO: 48) in a base sequence of human chromosome 8 in the GRCh38/hg38 human reference genome list;
(22) a region that is in a COL6A1 gene and corresponds to a region from 45989774th to 45989884th bases (SEQ ID NO: 49) in a base sequence of human chromosome 21 in the GRCh38/hg38 human reference genome list;
(23) a region that is in a DYSF gene and corresponds to a region from 71661602nd to 71661712th bases (SEQ ID NO: 50) in a base sequence of human chromosome 2 in the GRCh38/hg38 human reference genome list;
(24) a region that is in a FKTN gene and corresponds to a region from 105606387th to 105606497th bases (SEQ ID NO: 51) in a base sequence of human chromosome 9 in the GRCh38/hg38 human reference genome list;
(25) a region that is in a GAA gene and corresponds to a region from 80104281st to 80104391st bases (SEQ ID NO: 52) in the base sequence of human chromosome 17 in the GRCh38/hg38 human reference genome list;
(26) a region that is in a GALT gene and corresponds to a region from 34649835th to 34649945th bases (SEQ ID NO: 53) in the base sequence of human chromosome 9 in the GRCh38/hg38 human reference genome list;
(27) a region that is in a GHR gene and corresponds to a region from 42700567th to 42700677th bases (SEQ ID NO: 54) in the base sequence of human chromosome 5 in the GRCh38/hg38 human reference genome list;
(28) a region that is in a GLA gene and corresponds to a region from 101399920th to 101399810th bases (SEQ ID NO: 55) in a base sequence of human chromosome X in the GRCh38/hg38 human reference genome list;
(29) a region that is in an HADH gene and corresponds to a region from 108023829th to 108023939th bases (SEQ ID NO: 56) in a base sequence of human chromosome 4 in the GRCh38/hg38 human reference genome list;
(30) a region that is in an HBB gene and corresponds to a region from 5226117th to 5226007th bases (SEQ ID NO: 57) in the base sequence of human chromosome 11 in the GRCh38/hg38 human reference genome list;
(31) a region that is in an LDLR gene and corresponds to a region from 11120250th to 11120360th bases (SEQ ID NO: 58) in a base sequence of human chromosome 19 in the GRCh38/hg38 human reference genome list;
(32) a region that is in the LDLR gene and corresponds to a region from 11122702nd to 11122812th bases (SEQ ID NO: 59) in the base sequence of human chromosome 19 in the GRCh38/hg38 human reference genome list;
(33) a region that is in an MYBPC3 gene and corresponds to a region from 47343432nd to 47343322nd bases (SEQ ID NO: 60) in the base sequence of human chromosome 11 in the GRCh38/hg38 human reference genome list;
(34) a region that is in a PKHD1 gene and corresponds to a region from 51882676th to 51882566th bases (SEQ ID NO: 61) in a base sequence of human chromosome 6 in the GRCh38/hg38 human reference genome list;
(35) a region that is in an RPGRIP1 gene and corresponds to a region from 21320889th to 21320999th bases (SEQ ID NO: 62) in a base sequence of human chromosome 14 in the GRCh38/hg38 human reference genome list;
(36) a region that is in an SLC12A3 gene and corresponds to a region from 56883499th to 56883609th bases (SEQ ID NO: 63) in a base sequence of human chromosome 16 in the GRCh38/hg38 human reference genome list;
(37) a region that is in the SLC12A3 gene and corresponds to a region from 56893096th to 56893206th bases (SEQ ID NO: 64) in the base sequence of human chromosome 16 in the GRCh38/hg38 human reference genome list;
(38) a region that is in a USH2A gene and corresponds to a region from 215891470th to 215891360th bases (SEQ ID NO: 65) in the base sequence of human chromosome 1 in the GRCh38/hg38 human reference genome list;
(39) a region that is in the USH2A gene and corresponds to a region from 215794716th to 215794606th bases (SEQ ID NO: 66) in the base sequence of human chromosome 1 in the GRCh38/hg38 human reference genome list; and
(40) a region that is in a WRN gene and corresponds to a region from 31108365th to 31108475th bases (SEQ ID NO: 67) in the base sequence of human chromosome 8 in the GRCh38/hg38 human reference genome list.

8. A pharmaceutical composition for correcting pseudo-exon-type aberrant splicing, comprising the antisense oligonucleotide according to claim 1 as an active ingredient.

9. A pharmaceutical composition for preventing or treating the development of a disease caused by pseudo-exon-type aberrant splicing, comprising the antisense oligonucleotide according to claim 1 as an active ingredient.

10. The pharmaceutical composition according to claim 9, wherein the disease is at least one selected from the group consisting of: Stargardt disease; hyperinsulinemic hypoglycemia, familial; familial adenomatous polyposis; ataxia-telangiectasia; breast-ovarian cancer, familial; breast cancer, early-onset, susceptibility to; Leber congenital amaurosis; cystic fibrosis; Usher syndrome; achromatopsia; Ullrich congenital muscular dystrophy; muscular dystrophy, limb-girdle, autosomal recessive; Fukuyama congenital muscular dystrophy; Pompe disease; galactosemia; Laron dwarfism; Fabry disease; beta-thalassemia; hypercholesterolemia, familial; familial hypertrophic cardiomyopathy; autosomal recessive polycystic kidney disease; Gitelman syndrome; and Werner syndrome.

11. A method for correcting pseudo-exon-type aberrant splicing using an antisense oligonucleotide having a base sequence capable of binding to a sequence that includes a branch point in pseudo-exon-type aberrant splicing,
wherein the antisense oligonucleotide is the antisense oligonucleotide according to claim 1.

12. A method for treating a disease caused by pseudo-exon-type aberrant splicing, comprising administering to a subject an antisense oligonucleotide having a base sequence capable of binding to a sequence that includes a branch point in pseudo-exon-type aberrant splicing,
wherein the antisense oligonucleotide is the antisense oligonucleotide according to claim 1.

13. A method for producing an antisense oligonucleotide for correcting pseudo-exon-type aberrant splicing, comprising producing a base sequence complementary to a target sequence that includes a branch point in pseudo-exon-type aberrant splicing and consists of 10 to 50 bases.

The application's sequence listing, which the Patent Office published only in electronic form, follows.

SEQUENCE LISTING (74 sequences)

SEQ ID NO: 1 - DNA, 128315 bp, Homo sapiens
  source 1..128315: mol_type = genomic DNA; note = ABCA4_gene
ggacacagcgtccggagccagaggcgctcttaacggcgtttatgtcctttgctgtctgaggggcctcagctctgaccaatctggtcttcgtgtggtcattagcatgggcttcgtgagacagatacagcttttgctctggaagaactggaccctgcggaaaaggcaaaaggtaacagttactgtctgtggtttaaaaatgaggtgtggagcaaataaacaggttggaagtgtggggtggggtggtggggtagggtggtggggcagggtggggggttgtgagcagtcagtgggcttgtcgccgattagcactgaagcagtgtttagctggacggcctttctgtgggcccctctgacagtgcccttcccaggaagatgtgtttctctgtcctcagccacatgaaaatcttttgcctaccgtgcctgtcaatccattgcctgcccgcccctcccccaccccccgttttacacctgcctgtccagtctaccgctctctagggcatccacgctgagcagtgggaagaactttaagccctgaagagcaggccaaaggcaagcaagaaccccctcgaacagcttcccagcttagtgaggccttatttcattgattctctgaggcacattgttttttcacatgttagcatttctgaaattgggatgcagctcacgatcaagtcacagtttaactggacacattatttttctttcttagtggtgcagaaaagtaacagtgtgtcttacaattgactgcgtcctagattctgtgagatgcaatacgttattaaccatcacgcacatttcctgaactctttcaatgagcagacaccagcctgggttagactggagccctaaaagcacgacacagattccaccctggactggcttctgttctgcctgggaaaacccaaagtacgtttggagaccaagagcaacataaagtagcataggtggaatagtccatgagaagtgcgagcaaaaggtgccggagatcagagaacaccaagactgtacttgtaaatgacaactggctttgtgcaattttttctgggaaaggataaggagtgactatagaactgtaaagaaagaatgcactttgctacagccttgcagagttgtgcaaatgccgatgactaaaggagctgaaagaggaaggaggggataagggatgggggctgggtaggggtgagattaggaccctgggagctgcaagccactggagagatcaggaggaaagggagggagacctgctttaggcgagaagagaacagtatttgttccaaatctcggttcagaataagttcatgtaggtgatggggccaactggaacaggtgaaggcctatgaatgagtgtctcagttagggtctccttagagtttaatatgaaaaggtgttagctaagtacagagctggtacctgagagagtaaaaggaaactctaaggtatcatggaggtagcaattgcaggacacagctcccacccctagggctgagagaaccaagggaagagacaggaattattaagacttggagcatagatgagaggtctgtggagctgacattaggacttgggaggaaggcgtgcatggaggctgctgctggatctctgaacctgacctcgggtctggacccctgaggagaaagccctggcaggttggtgcatgtggggccgagggacaatagcttaacaaccagcataaaagagagcagcatgggacacgcttcaaccatgcgcatggatggctccaaaacctgtgtgtggctggcccaggacgcagggaggctgcagggggaagagacaagttaaacctgacttgtctgggaagcaccattgtcctcaggtcactttcctctgtcaagcctggtgctgaagttatctgttgtctccaggggccaagtattaagagtaatcagaaactcagtcctttcttctaggagcttcccttcttgcatgaaaatcctgataaaactggaaaaaaaaacctcatgattaaattttttcatgtattcattctttccttctatcaaaaaataatctccaggcaccgtgctaggttcattggtatacaatggcaacaagacctcccagcccctgcctatgtgaggcatctgtggactgcggaggaaaatccaatatgccattgttctctctttcccataagaaattacaattctcagttcattttattctcactgtgctctttgtgaccctcaaagggggtcacatgataacaggactgtagctgctggcctaaaatgagcccattcctgtggcgctcatgtcgctgtgacagagaataaccctgttttcagaatgctctggtgccctccctctcaatctggcctttcgctggcatgggtgggcgactcctgctcagggactctgccttctccacagtgtgctcccagggagatggagccactcgggctgagggccttggccagggcacctcccagggctgggcctggtctgggctggcgttcactggatgccatcctgatggcctggaaattgagatttctgtctggcacgcctcccgatggctccccacctgctaccacattccaggagcttccaggatgtctgggtaagacagaggcacccccaacagattcagtagctctgagagggatctgtggctccttcctaagcttgcggttcttctggaaacttctgcctctagaagatggtccctctaagaaaagtacaaccacccagcccataattcagctcccaggttttccctcaaacctccatgtctcctgtaagcagagcaagagtaaaatcagataccaaatttcctcattcctcagctcccaatccctaagggcataagatgaaaatcttcagatctctgctttcctccctctttttttcttcctctgttaacatttgtcaagtgttactaagtgtctggcactgtactaagtgcatcacctccctgaactctccgaacagttccacgagagaggcctctctgtgatccccccggtactgatgaggtcactgaggctccagagaaggattagtaactggtggggttggacctgggattcacacccatgctgcgtgacccaggacaggcaggcatggccgttacaccacactgacccccgtggatcgagatctatccaatagtctggtcactgatatcactaagatagagtggccatataatttatcatccaatcagggcagttttgcaagtgaaagggagcactattaataattgcactgggacaataaatgtaaaccaacactggacctggaaaactgggacgtgtgtttgccctataccaaggtaagctagacacagccactgccttcatggagttcagaaccaggcaggggcggctcccacgtataattactgtgcagcacaacgtggagaccgtggagtagaaggaaacacggatgggaggtgaggaggaggtctgtgagctcagaggaggcaccggggctggagagggtgagagaagacttcccaaggagttcatcctgataacgtgcattcccaatgacgagcgctctctccactgcacaagacaagtatacatctgcccgtgttggctgtggacctggcgctgtgtcagggagggtttatgaagatcactaggtgggtctcttggtgtcatcccttcatcccagcttctgggttaggatggatatctgtgggggggcctgaggactcatgaaagtggggcgctaatcatgttttggacaccacaccctggagcacctgggacagctgtggcctttgtcctgggttcagcatcaagccgaggatgtggcaagtaaagagaggctgggcaccaactccagtgtacccaggctccgggtcatgtttgtccaggctaagaattctgtcctggttctcagtgcagaaggaagaatcatggggctcattttaggccttggctgccttctgttaaattgaaaacagagcaggaaggaagaaaatttaacaggctcagttctaaaacaacaagcacaactgtgcccttgccagaaacccctcctccccatgttgattgaatggtaaagagaggaggggaggtgagagggagagagagagagaggaagagagagagaaaggaaagaaaggaaagaagaagaaagaaagaaaaggaaagaaagaaagaaagaaagaaagaaagaaagaaagaaagaaagaaagaaagaaagagaaagaaagaaaggagggagggagggaaggggaaaagaaaagaaaagaaaaagaaaaaaagaaggaaataccagtttgggaaaaaagaattttccaccagcccttctgagccttggctgggcttaattaaagttacagacatgtgtaaagggcagggtagggggagtctgagctgctgagaaaacatgtttttaattatactgtggaatttctccctggggtatgcctgtacgcagttaagcgtcaaggacagggatgccgctctggggaggggaagctgagcatgattttggaagccggcagaagaggctattgtgaaaaccagacctgtcaggctaggaaaagaatggctggtggtctttgaccagggagtgacgcgtgaaatgcagcaaccgcccccgccccccgccaaaaacaaacacactctcacagagttagaacaacagtgacctctcaacaaatatttttcaaagattaccaaccaaccattacctagagcagcggttctcaaccttggctgcacggtggaactacctgagacgtgttaaaaagaagaaccctgatgtcccatgccccaagattctgatgtagttgatctggggtatgatctgagaccccggcatgttttcagcctgcagccacatgagaagtgctgacctaatcaacaggggtgatgatttgaggggcggggactataggcaaaaaaaaacagcctaattcaaggatgagaagagggcacaggtgaggtgggaacagtcctagggccagacaaagaaggaagggagaaaggaggtgctgatccctcccctactcctgagaggaggcctttaagtcaccgtgccttgtggagaccagattcttcaaaaatacaagaatgagtgagtgagggagtgggtggatgccaggagagtgcgtgacaagccttgcaagggaggatgacaatgcactagcttggtttggaaattttacccctggaacaggcaggccaagctggctggtcccctccctgatacacagccctccctctttatatatggagcaggggacggtgtgtggctggtttcttagcaagcaccatggttccaagttggcaactggggagttctgaatccaaaaaggagggagatgaacgtaagtggagggcaggcctacaaggttgcagataagcttaattctgtctccttactcttctgcctttgcaacaaccctgtgatcttgcgacaaccctgtaaggcaataacaaatggctcatgtttattgagtgttacctcatgccatattgtgctttcgtgtttaacacaattgtctcatttcaccctcacgactgctctgggaggtaggtcctggtatcacatccatttcacagatgagaccatttggcacggaagagttgagtgggctgcccaaggtcacatagctaagatggaacaggctggataggaaccccagtaacttgacctcagagtaaccttctcttaaccctgagtgtacactgtaggaaaaatgagcagtcccatttcagagaggacaaaactgagactcagaggttaagcaagccccaaagtggttgttaacccagatcttcccactaactcccaaatcagcatcagtgtttaacgtaccagacctctcccagatagatgttgccgcatggaagacagccgatctacgtgatagaaagccaatattgcaagcagtcgtctaaaggagtcaaatgtgttggatttgaactggatgtctcatttctttggtgaagacactggaaacaacttccaggtttcatcaattgctcctatcactcaacgttgctatcttactgaacttgttccccagccttacccactgatggaatgatccagaatggaagacaagacaccaatgtacatgaccctgggggaggctgtttcttaaatctacagactgttggtgacctgagccccatgtcaccaaaggctttcctggagaagcctcctagaccagtcttgacaaaggctcactcattccgtggatatttattgggcacctattatgagttctgccccatgtggggtgctggaatcacagtagtgacaacgacagatgaggttcctgtcctcaggaagcttactgcccttgagggcttcacttacttggaggagtgatgaacctgaagtgcggtgtgtgttaagaagcggaagtccagggccaggcgcggtggctcacgcctgtaatcccagcactttgggaggctgaggcaggcggatcaccaggtcaggagatcgagaccatcctggctaacatggtgaaaccccgtctctactaaaaatacaaaaaaattagccgggcatggtggtgggcacctgcagtcccagctactcaggaggctgaggcaggagagtggcgtgaacctgggaggcagagcttgcagtgagccaagatcgtgccactgcactccagcctgggcaacagagtgagactccgtctcaaaaagaaaaaaaaaagtgcctcacggagagtctattcttttcttcccatattgtgtgtgtgtgtgcgcgcttcctccaacacatcctccctatatatattttgagtaaaacatcttgtaaaaagttacagctacataatcaccacctgtccctaaatagtttttgctttttctttcttcaatgcacgatcattttcccccatcaatttattttttagtttcttataatcttgttgccagtaggctgttttttaaaaagcagaacatggtttgttcttactagcaggaaaggagcatttattgagcctctgctatggtgtcttttattttgctgagagcctatttacatttctttgagaggaaaacaacaaagggttacatgaaagaccatgtgaatagcccctagctgatctattaaacttgctattccccggccagctgcttcagatctccttcagatcttatgtgtttccttcctaaggtccctggagtaagggttgcatagacctattctactctccaactcacatgtccctctccctcttcctctccataattccacatctccaacccccacccctatgtgcaatgccacagggtgtggactgccacagccactggatctgcttttggaatcaagagtccttaagctccaaatggaaccgaaatttaaataccaactttcaaccatatgttaacatcagcagcctcttccaatgtaaaaacccatggcagtgtgccctgctttgtttctttaagcaatagaaacttgaaggaagcatgttggtaggccagatttttgttggctttgcaatggatcacagtcatttattcactcattcattcactgattcattaaatgaccacatttgcaagggcaaggtaatggggagggccagaaaggacactggccccagaaacaggaggctggattttggttctgatgctgccactgctgatgtgacactgcacaggtcacctgcctcctctgagcctctttccttaactgcagagtgagtggctacagagaaatctttactacctgttagatcagcattacctgggagcttgttagaaatgcaagctctggtggggccatactgaacccaaatctgcattcatgtgcatagtgacagctaaaatgcactgaagcagatgatcttgatgatcctttatgaaagtctcatgctaatgcagttttctaaaatagaggcagagtggaacccagatggacacaaaatctggttgatataataaaacaaggtagagggtgtatggtggggagggggtaaaggaaggaaactgtttaggtaaagataccacaaccaaagtcctactgcacacatgggatctgaggagggctgtgtctgctctggttacgttttctataatctcttagcaccactgaactttctctctttttgttttgtttttccagattcgctttgtggtggaactcgtgtggcctttatctttatttctggtcttgatctggttaaggaatgccaacccactctacagccatcatgaatgtaagcatagcagggtagcttgggcaagccctgaagagactttggtctgggccttttgtctagaaagatcttggggtgggagtgtggggatcagatctgcttatcatcatttcatgtctatgatgcatgtaacagatttatcaatgttacacaaattataatttttaaaaagtctttagagacagggtctcactctgttgccgaggctggagtacagtgttaggaccatggcacactgcagcttctatctcttgggctcaagtgatcctcctgcctgggcttccaaagtgctggaattataggcatgagccactgctcccagctaatttttttgttttttgtggagacagagtcactacattgcccgggctggtcttgaactcctggcctcaagtgatcctcccacctcagcgttctaaagcactgggattacaagcatgagccaccttgtccagcccaaattttcatgttttaatcctacacattctaagcaaatacttgtgtgtagttactaagggactgtgcacttatttttgtttgctttgttgttgctagtttttatttttttatacctaaactctctcgttttaaagagaacagatttgtagatgagttctcgaaaatatttcaggaatcaatatagagaatatgttatacatggtgccagagaaaaatgaggacaagagatgctatacaatcgtactgaagaaaaattttatttcttggacccctgaggtgtctgcagacctgaaaggaacctagtgagagcctcttttacactctgcccctgtgggaaagccttcacctggtttccggccctctatgtggtgaatgtggaagcctcaagcgttatgcaaatctgcccagtcctctattcttgatcttcaccttctcgttcatgagtttcaggccccagttctgaatcagcctcctgtccatcagactcttctttacctctccccgaggagcccataacctgcagccctactgcatgcttggggtaggtgctcagttcaccgtggttgaaggaatagacgagcgtctgctcaagcagcagcagcaactgcgtggagtcttcttgaactaacactcctatgcccctctcggcacaaaatgacgtgtccccccttgcttccccttcacatttccacccatgcctattacaacatccgtctgtctccccactacaccgggagcttgagagaagaggccatgtctctagcacccagcacagggactggcacacatgagatgctcctgcttcttaaatgctgagaatgaaggaggacatcagaggggcccgggccccttcccaaaaaggccaactcctaggtctgcatcctgcttggtctccatgactaatcccgtcttgtcctcattttctgttttaaaggccatttccccaacaaggcgatgccctcagcaggaatgctgccgtggctccaggggatcttctgcaatgtgaacaatccctgttttcaaagccccaccccaggagaatctcctggaattgtgtcaaactataacaactccatgtaagtgttgagatccctaccatgcaggggaggaagttgcacaccccttcacgtgctgaaatgcacacgtgcgtgcacggagcatggagcactgagtgttcttgtggctttgctgagcccctaacctcttaggagcagagcaggtttcctctctggaacattctgttaactgtcagggcacttggggagaaatctccaagctaaggccacgtgcacaaaatttcttggtccttatatccccagaatgtgacctggagtctgatggcagcccgctgcagagatgtgtccactgccttctggtcattgacctgcttgggtggagtgaatcattgtaggagaaaaactcagttccctcaccctgatcaacctggacagatctctcttcctttaaaagctttcttggacatctaagggctaggaaaaatgtcagggagcattgggaaggtaaatgaagtcaggtttacaaagtcaagtttacttcttgggagaaaaatacaatttccaaatcctctgttataattgccatcggccccctggagtggtgagatctcggaatatggctcgggtgcagtggctcttcactgtgggcctgcaggctattctgaaaagctgatgaaaaccaatgacccctcttccaagaaaaatggccacataccaaacattacactgtacatctgatttcagggaattgtagatgccaggttagtagcctcaggtctagggtcaaaattcaagtcgaatcccacaggaagagggtctgccttcggaattccctttcagagcattgggagaacatcatgggagcatattctagagacagaggcttagggtgtggacagggccatccctcacccactgtgctgaccttaagcagcaccttgtgcagcccatacctgaaggccaccagcaaaggcctgttggggagcaggctttacccgacctgtataaacaccaggctaggtgaaaactgagatacctggttactttagttttttccttgggggagctcagtatgattcttccaggagaagcctgcttttagactaaaaagaaaaaaagtttgataggtcaacctaatgattggaggtggccttccccactgtgaacaaactatggctgcatgtgccctacaatggcagagttgagtagttgtgatagagactgtatgatctgtaagcctgtaatttttatgtttgctgacccctggattaccagatgatagaagaggaaacatctgtcttcctagcaaagtcaaggaagtggcatttagcaggactcatattgctgcaagcactgccttgcagttttagtttacaactgcactttcagcttaagaaacacctgcccatccagagagatcgtgtggggtcacatggtgggatcagggaggcctgaagacagctcagtggaggctgcatggagctttggtgggaacggccctggcagtgtctatagatgttattgcggaaaactgaggggtgggagttggagaagggggctccagactctagctgtacttggcatttgaacccggaaagttgggtttcatgttttgcactcacattatgagtgaaatattggcttattcaaggttcttttgcttgcaaggcacggaaacccattcaagcaatcttaaaccccagaaggaaatctatgatttggatactagacattctcacagagccaagggcagcaaggcggggctcaggagaggcaggccaagacctggagagctgtcaggagctgcttcctcaactctcttccatctgggcctgccagccctggcctctgtatctactccattcacctctctccatggaccagtctcccctgctcctcaatgcctgggctgccattgttcatgcaattcacaatacctcggcctgggcaatcagaagctcatctctgaacaccatccaaattcctgggaacaaatcgggttgacccagctttattctccctgtcccatcagccttggcagaggcgtgcatgtgcatgcgtgccaatgtgtgtgtgcagggaggtccttgtggatgaagcatggctgtcagagcctacctgcgtgaatgggtggaagggcaggtctcagagaattgggtaaaaactggataaaccctccagtgatatccaccaatgtcaccctgtttaaggcttctctgggcaagagacacacagagcatgggaccgagaggcgagcagaccctgccaaaactgggagactgaatagatcgctcaccatccttgtcagttagcctatatgtacaaggaagtaaaattatctctttctcctgccttggcagtattgtaaggatactcaatgtagtagctaggccagacacatagtatctttaaatatagcatgagatggccaagcacggtggctcatgcctgtaatcccagcactttgggaggctgaggcgggtggatcacgaggtcaggagatcgagaccatcctggctaacacgatgaagccccgtctctactaaaaatataaaaaattagctgggtgtggtggcgggcgcctgtagtcccagctactcgggaggctgaggcaggagaatagcgtgaacccggggggcagagcttgcagtgagccgagatcacgccactgcactccagcctgggtgacagagcgagataaaaaaaaaaaatagcatgagatattattactgttataaaaataacagctatttccttattaatgaggctttgtccttacagcttggcaagggtatatcgagattttcaagaactcctcatgaatgcaccagagagccagcaccttggccgtatttggacagagctacacatcttgtcccaattcatggacaccctccggactcacccggagagaattgcaggtaagcatgactgcagtgctctcaagcatcatttccctcacctatggagagactgaagatataggaaagaacagggagagttggtgaaaaatatactagcggaggcaggaagggatggggtctggaggcggcttgaacatcaccttggtgaagatgcctcttcctccacagaagcctggaaggtaggaagttgggaaggaaggcaggaaaggtctcatccacgttaagtctagagacagaaagaatgctaagagagatggcactatgggaagtatgaggctaggtcaagggctagaagcaggggagacgagtttacagagtttcgtaaagatatagagcaactctcacagagttctagagcgagagctaaccaggaacatgaagcagcaaggccaactatcattaaggagccagggaggtcagagatcatgtattatcatgacataaatatgcataattgtactatttctcccagtaatatttagcacccaggccccgaggcagagcaagtggagagtgggtgatgcagggctgggggtgtgtatggaggcaccacagaaggtcaacaggcagcgggctgaaggcagggactggactacatgcatcaagtccaggctgcacgaggaaggatgagaaggcagatgagcacggaaatggactgggggaaatgaagaggcaagggaatagaagtctcagtgggtgccatgaccctgtttaagtgattgagaaaatgaacaagatgaaaaggttaatggctgtggtcagaaagtgaaatatgtgaattcaggatttcgaaggtagggtgggtgatgactggcccccagatgcggccatggtgaagtggggcaaaggtgcaggtgcatggtgaggggaaggaggaaatgggaggtgatgatgttggccccacacggacaccacggttgtgcaggaagatggcaggagctgggcaccagggtgggagccacctggagtcaggaagagtgaagagaaaggatgaagaggctccctctcctgtgtctctcctccccaggagaagaacaagaaacaatccgaaagtaataacaccaatgtgcctttacaaagtgtgagtgggtgttgtgtgctgtcacgtgtgtagtaggctcctctgtggatggctagagggactggacatggccactggatcccacttgcaagagcagaggaaaagagtggtcgtgaggaagtaaagccccccaaaatccaggggttgctgcagctttgggtgtggagcgtgccctctgaggaaaggctgctctgggggagattgcccaggaaacggggctcagaggccacgaaagcagctgttaggggcttctgggagatgtgtgctcctaggattagggagttgactctaaggatgaccttagaggttaacagggatgagaaaggggtcaccaaggggtctaccaggggaatgggagaggctgtattgatagaacagcttctgctgcaggttccaaacaagaaatgtgggagaatggttgaaatcagccccgggggcaccttcccgtgcatgcgtgcagctccttcaacattcagtcgaccttcagtgcctcctgtgagccaggcactgggctagtctctgggggtggagagatgagtcaggcaaatgccagccctcagagggctcacagggcagaaggtgagagatgagtgagcagaaaatgaccacagcgcgtgtggggcccagtggagggaaggaggggattcaggagcacaggagagtcaacaggggaaacttctccgaggagaatctgatcctcctcccatctggccaccttctgaagccctctctccccatccaagtgagaaaggacaggcgtatgaccagattggtgtatgaagatgctgaattacgttctcattgtttcaaactagtaaaccatagattttatgtagtaacttctacaaactgcattacaaacactccattctttgttgccctgggtagaagtttattttagtgagcccaagtttgaggaaccttatatggtatgagtacaattaccattttaatagtaagaaatcccccttcccctgtgtaccaaccagaaggtgtttttttcctaatttaaacaaacagatgcagacgtgggctgtccagctcctggcgggatgacatacctcatgcatccagtgggtttgatgatgaggcagacatttcacttaagtgcctgatcatcagattgagtcctgctgggaggaagtgtgaaggaagtaatttcaaaccacagtttctctgtggcttttacaatgtggatatgagaaccaaaatcactacttcttaaccccagagcaggactgattttgaattggtatgcaggcggttccttctgcaggcttcgggctgtgagaagtccctaacagagcaaatctggggacaagggctcaggaaaggttggccacggccccctaggaatgggggctctgcaagatccctggccttagaggctgtgagagggaacaggggtccatccccaagtaagggacacggtctttgaggaaatcccaggccagggcctgaagggcactgtcaggaacacaggctgtttcagtctgttgagattcaccggggcgctgctcactgtgagcacggactcctcaggccaatgtggcagaagagcccacctttgaaagcgagcgggtgggggtggcggggctggtgctggtgcgtgcttctgcacagccacctgggaaggtatgccgctggttgacccaggcagaggttttctttcatggcaaacctgcagtactgcattctcagcagggaggattaatggtaaaagaccaggcatggagcccccttccctctccctcgaagcaagctctgtggtctctcaatcatctttaaaacaccttcttcccgggagcctcctacattctcctggcttccctcccacccccaccctcagctcctggggcctcagcagccccacccccaagcctctaatcttcccagggaagggaacaagaagaaccacattttaaacgaaatttatttttctttcctcaggctcccagttcacatttctccctcaggagtctagggaagcttctgtctggtatcggcctcctcttcacctgggcccccgccctcctcaggtgtaccagaagccagcacactcccccttcccccccagagccacagcagccctgtctcctgggtggtcttgtgtgccaagcctgggcaacatcactcccagcttttcttgttttgccccttctccccagcaagatatttgtatgtaaggtcaggtgagtgagttaaagaataacgaagagataaacagtcaaatggagtcctgactgtcaggtcaagacaacagttatttactgaatgcctcatgtcattcaacagacatttattgagactctgattggatgtcagtctttaatgctgggtgtcagagagaggtgacttcaagggcttgcatctgtgcacccagcattgctaggtacaatgaggagtataataaaagcaggagccatagcccccaactctcaagagatctcccatgtgtgtatgtctgcatatgcgtgcgtgtgcatgtgtgcgcatgtgtgcatgtgtgtgtgcatgtgtgtgcatgcgtgtgtgtgtgcgtgtgttggggatggtgttggtggagtgagagtgtacaaggctgtgtatgaaggggtaattgggaaaagaacaatggagctggcacccagggacaggaggaaaagcaggagggctgggtttggaagacagccggatttatgtttttgaagagggaagactagaatataagggagcagcccttctcagagccctcctcctcccttcgggccctgtgtccagctttccccaaagtccttggatctttcctatgcaaaggggagtgacagtgggcaccactctcagggaacccattactgtgagagaagccactgtgccactgtgtggtcgaacttcaagaccggcttcccctgccccagctgcatggacaggcctgtggggttggcgcaagacccttccagaggaaactagctgcaacataaatccggatatggtgctgttcagggaaaggcacaacctggggatgagaagggtggctgtccagcacacaggggcaggcctcttggccactgggggaggggagaatttggagaggaagaggatgggatgccgtggaattgggaccaggaaagaatggggacatgtgatggttaaagctagttagagaagaactgggagataaacagtcacccatgcccctgaagcactcggggtgaagagattggcattttcacgcaccccagtgctttccctttgtgttgaagtcccttcgtagacatccaggcccataaggctcttctctggccagagcctcatgaactatagcactagcagggttgaggccaagcattggccctggaagccagccgaggaggagggtgcttgtgtgaatctcccaggaggggtaagaattatattaattcgatcataataagcatttattgagtgctgttttgaggcctgggagctaagcacttcacattccttaccccgcatcaacaatcctatgaggtagatgtggaaaatgcagacacggggacaggctcaatcacttgccccaaggtcaccttaactgttaggtgttctttatgcctccttataaagaaaccctgcttcccacaggtgttgagaggagctggagggagcttgactagggctcatcaggcaagccccggcatgtgcctggctctcctctttctacctggagcttttcctgcccttaatggccccaactcatttctcttagtccatgtcagtgccctgagcatctcagcccaagctgagatgatagaaacacccagaggggtcctctaccctgtgacagctgcggtgtgggaagagcacgtgtctcctccaatcctagaccagagtttctcagcctcagcatcactgacacttggggctagataatcctttgtgtgggggagggaggagtgtcttgggccttgcaggatgtttagcagcatctctggcctctacccaccagcacctccccagttgtgacacccagaaatgtctttagatcttgccaaatatttccaggaggatgaaattcccctgtttcagttccccagccccacctcaatgagaagcactgtcctagaccaaccccacaaagcatctgacacccccatccagccctggctaactttttccaccttcttactaaattgggcccagctgcttcagcagtcaatgtgttgggggcagcccactggcaagagcctcacctctaggggctcccagagaccccaagaacagaaccttcctctgagagttgagttacaagtgtttccaatcgactctggctgttttcctttttttgacccatttccccttcaacaccctgttctttctcttattcatatgtaggaagaggaatacgaataagggatatcttgaaagatgaagaaacactgacactatttctcattaaaaacatcggcctgtctgactcagtggtctaccttctgatcaactctcaagtccgtccagagcaggtagggggatgtcactggccagtggtccctggaggggagggaagcacccagcctgagaaaggcaagaaatatattggcttttttcttctttcttccttgtgttcacattcagaatccatcacttaatgccttgtatttagaaaaaaaccgggggatcacttgagatcgtgatcattttcaacataggattcgaagctgtacacatcctggtgaccttaaaacatctcaggtttttataactggaaggaaccttagagatcatggggcacaaccttctctttatagatgaggaaacagaaatctattcatttattactcaaatatttagggacagttgtaggtactagaacacagtgtgaaccagacaggcaaaaccccaggccagggagcttccattccagtggggccacaggcgatgctcaggtaagcagagactccgctgtgtgacttctggctgtgatgggtgctgcaaggaaaatccggtagagtcgagggttagagagggacggaggggcaggtttaagggggatgctcaggaaggccttcctgaggaggtggtatttgagcagagttgtctgtcagccacacagtaagtgagaggggagttccgggcttggaagctgccagcacagtgctggcaagtgctggggtggcgtcccgaggctacagaacctgagatgctgcagaagagcccacttctgctttcctggaccacttccttctcagcaccaggcaaactccttcttctatcccctggcacatttctgacctgtgtatacgcccccaatttatctaacccctttaaataatctcctctatttatgcagagcattcttaccactaactcacgacttgcacatcccttagctcccttactcctcacaacaatcctgagatgggtcagagaaggaggcttgcgcgtctggtgatggggtgatttgtgcacagttacagggctagaaattgtcagagccagatggaatccaggtcctctcaatcctaatccagtgtttcttacttcagtcctgtggctctcaaagcccagagaccagcagcatcagcgatgcctgggagcttgttaggaatgcaaattatcagggcccactccaggtgaactgggtccaaagccctgggataaggcctagcaatctgtgcttcacaagccctccaggtgattccgcaggctcaggtgtgagagctgcagctgtcctctgggccttctgggctccccgcccagcttcttcagtgtgatgaacacagcgagaatgctagatctgcagcagctgatatcccagacaccctcccgactccctcctggctgggtctgatcctcctccagactccaggagagaacgagacataaacagaacttcagagcctgtgttaaccctgagatcaaggtctgcacagggtgctgtctgagtccagaggagtgagggaccccaccccacctggtcagcaccagctcctggaagcaggttctcacactggttccctgcacaatgaaggagctcatacctgcttttctggcttctcagaccctgaggttttcaccgaaactagacaaggggaacctagggtcagcctggaggcagggtgagcttggcgcctgcagtgcccaggccctgggtggtgcggctccggccaggccctgtttagcttcctctcccacccccacagagggggtgctgtcggcaccgattgctcattttcccctttgctttctcttcagctcgtaaaactcaagtcctgacaatgccttgatgacttccagttggtaataaaagggagatgaagataaggacaggaatttcggggaaatttctttccagttccttactaatgtgacatttagatctctagtactgtgcttctggcatcagtgccaaggcctttcatgttggagaatggaggccggggtcaccaggttgtgcctttatttcatgttgctggctctgatgagctgatgctctgctgattagcaaacgctgagccatctgcgcttcgcagaggcacgttccagccaacccggccctccctgcccacttcccaggatgctttgccttgtgggctcacctgtcttctagctcctgatctgtatctccacctccatccagttccggggctccttatcagcactgttcccagaactgtccatcacgatggcaacgttctctctgggcgctgtccaacatgggagctcgcctctgtgttgtcactcatgctcattgaacatggatttgtgtcctttaccatcaggactggatacccctcctggtcctttctgcctggggtcttagcacagctcagaaggaacctcaccattccctctctccatctagggaattagaagatgacaggggcacagttctctggctcacccccagcccagtaaactcctggacatgcttcaaggcccagctcagatgttgcctcctcagtgaaataatttataaacccacccttctttgtcctgccttctccctcttccctactcactggagagttaacaggtgatggttaagctctgggttcaaatctcacaaggccacacacttagctatgtgacttcaggcaagttaattaaccactctgtgcctctcgtttcctcatttgtaaaatggaaatagtaaaagtgcctaccagcatggcagttgaagttaaaagaaataatatatgtgaacacttggaagggcgcctgacacatagtaaactctcagtaaatactagctgcttttagtggctattcttaacacaccctcttcagtgctctggtttcactatgttttatgggtccctgagatcgaaagtgtccacaccgactcatggtcagctgtaacctgtgcctcgtgtggggaccaggctgccatgtgtagtctggacagtgtaggaggtggcagagctcaggcctgttctgccctccagcccagagagccacgtcgttagatgtcatgggagactgtggtgccccgggaatctcacgaatttgcccacggtactcagtgtctgtccaatgctatgggagtccaggactctaggagccagttaaggtgctgggtggccacaggtccctggccaaggtccaggcctctcccctgccacctgatcctcgagaggccatcacgagggttgtacttcaagaaccactatccttgagctacctaggagctgcagaatgtgcactctgcagggcttagggcctgcagacaagatagatgcagggtgtctagttaaattcgaacttcagataaacaacaaataattttttcaaataattgtgttctattcggtccctatttgggacatatttgtactaaaaagtattcatttatctgaaattcagattcgactgggcatctggtgcttttgtttgctaaatccaagagcaaatttgttctagctacttctcaaccccaccttcagagaggaagccttgatggtactgtaacatcatgctgtaagaaggggatcccttgaattgtaaatggcactctgataagatgaggtatggggattgtattggtttcctgttgctgctgtcataaattaccacaaacttagtggcttcaaacaacacagatgcattatcttacagttctggaggtcacaagtctgaaagttagggcatcagcaggactgcattccttactgcggagttctagagaaaaatccattttcctgcctccttcagcctccagagacacgccacattctttggctagtggtctgcttccatctccaaggccagtgggggcttatcaagtctttctcacatcacatgactctgtttcttctgcctccctcttctacatttaagggacccttgtgattacacaggggcccacctagaaaagccaaaataatctccttattttaaaatcagctaatcagtggctttaatcccatctgcgatcttaattcctgtcgccatgtaacacaaggtattcccaggttctgtgggttaggacgtgggtgtctttcctaccacagggcagtttctagtgttgcctcttctccctgcagttcgctcatggagtcccggacctggcgctgaaggacatcgcctgcagcgaggccctcctggagcgcttcatcatcttcagccagagacgcggggcaaagacggtgcgctatgccctgtgctccctctcccagggcaccctacagtggatagaagacactctgtatgccaacgtggacttcttcaagctcttccgtgtggtaagggaggggtttggctgctcgccaattgcaaggtgattcctggggtagcagagcctcacgaattgaccttggggagggcgtgagcctggtgttctggacaatccttgcaaaagctccaggctcccagggctcaaaaaatcacaactgatagtatttctagaacagtggcccagggacccagaagtcactatgaggttcaccattaggtatgtggctgtggcatgtttgtgtccactctaaatgtggggataatcccctttacctcctctaacagagtggtaaaggaaggaggaggcctggtttgactccctgacctgctatttcctagccaggtgatcatggtaagatattgaaccttttctggtcccagtactcatctataaaacaaatataatactttacagagtggtaggaattatacaagaaaagtatacgcaaaacatttcataaattttaataaatgatggccccatgcttcttcctctggaaatggtctcaacctcaatggttggtgtttctagagagaaaaaacgacagagaaagtttcatagtctcaaaaatttggaaagccctgatctagctcaaccctttgttctagaactgcatcccagacagactgcttgggacctgaaaatatctcctcctttgctagaaggataagatgagaaggaattagataaaggaggtgtagagcagaggttttcacactgcaaagtgcataaaaaccatcagagggccgggcgcagtggctcacgcctgtaatcccagcactttgggaggccgaggcgggcggatcatgaggtcaggagatagagaccatcctggctaacacggtgaaaccccgtctctactaaaaaacacacacacacaaaaattagccaggtgtggtggcgggcgcctgtaatcccagctactgaggaggctgaggccggagaatggcgtgaacccgggaggcggagcttgcagtgagccgagattgcgccactgcactccagcctgggtgacagagcaagactccgtctcaataaaaacaaacaaacaaacaaaccaaaaaaacccatcagagaagttggtaaaagatgcaagtgctaaatccccacccccaatcactgtgattcagaagaaccaggccaggcccagaatctatcctgttaccttaggcgattctgatgaagaccattgtaggccacactttcagaaacactcaaaattagaatccttcagagaaggtggcatatataatatttctagcatggaattatgttttttttcttttgcctacattttaatttctagaactgtgttgtagggaatgtcagtcactaagaacttgattgaggaactgtgttttgtctgtttcatgactgctctctcaagtcccaggaaactcactttcagcttgtcttaaaaagcaagctgaaggcttttaaaaatgaagcaacatgaaataagacaccgcagtttctggcacggtccacgcttaatccccttcaatgtgtgactttccgtggaaagttactctacgattttcccagctcgtcagggtggggccccagagtgagtatgaagggtcagagcctagggatgccaccatcagtgagagcccaggaccccagaaaaggtctcttggctcaccacactgtaggaaaaataaaaagcaatgtagtccaaatgtctctatccaaagtttcaaaaagaacttgattttagacacgctccttgacttgttttcagaatcagacagaagagtgaggcaacaaaggtcccttattccaggcagctgaataccagcacagccaggagtccagtgctggtgtttgcagagccaccagaggctccctctcaggtgtccagggcccgcatgctttgtagaatgggcagaatgagcaatgtctgtgcacctgggctttgcaggcagggcctgggtacccaggttcgtgcaatcctctcgtcaccatgaagggagcagcatcattcttcccttcttgaagcaccttggccaccagtataggtaaatttacctcccaggacatgaccattgattctgggatgtcaatgccagagatagtagggtaaatcggcacctgggtaaaactttccattggagactagaaccaaaactcaggacactggcttccaaatgtttctttatcagacaagaaagaccaagtctttccttacgtcttcacatgctgccttggcaaatgctagcattcacaaaccctgggctaccttgacctgtcacccttgcagacctcagacgggtcctgggggcttgctttctcggtttctgtatgcaggcactcaaacctgcatcaggcacctgtgaagggccgggcactgtgctgaggccaaggctccaaatgtgaaccttccaccctcactgaactcacagccagaccagagacaagcaaacaggacatttcacagcagtgcagcctagaaagggccaacaccagcagcatttgtccccccgagcggtagcttttagaagcttccccagtgattcaatgtgtcctacaaatgcctggcccccactcccagagattctgagtcagctggcctagggtgcagccttgacttcactgtgttaaaaagcttcccagataagtccaatgtccggccaagattgagaatcactgacctagagtttaatttaccacctcagtctctatagaccacgcataataatagtaccccacacacctctgagggtccaaagaactttcatttgatcacccatgagaccaccgtggtgtggagatgctttctctctcctgttctcttaacaaagctggtgagcgacagagcctgcagtggaccgggagatggcccagaggagaaagctctgccgtagtcggcctcagttaaccacggagcaccacccctacctgctctcctctcactcctgcttccgtctcggtggagaaagatccaaccgaagcaggacacatctagtcttctggtgcctttaaaatgtacttttccatttgacaaatggattacactaaaaacaaaaatttacaaaaaaaaaaaaaaaacctgaaagaaattgcaggcattaaaatgggactttgcctttattgctcctgggcccatcctatttgggtttttagaaaaacaagcctgaggcaggcccagaaaggctcagggcagaccctccgatcctctgaaaggagcatcaggcaggcaggggttgctccggggccagggaaggggccccgctgggacgcggctgttattgcagctggttggcgcgcagccatgcttagctgcagtgcgggaatgctgggccttctgttctgggctgtttctcatacgcacgtaggccagtgtataaataaggttttattaaatgccaaatgagttctcattaacaaagaaagagggaaaatctcagtaaaccaccgtgacggcatctacccactttgagtcaggagctgggggtgtgagtgcaacctccgagacaagggaacctgtggagcccagagaatcggaggggggcgctggggttagcaccgactgagaccagctgtgttttctctcggttccttggagatcagaagtgagtgttgtcatcttcaaacaatccaaaggcagtacccatggccttactacatccctcccacaccatcccacccatccccgcgcgtacactcacacgctcatttgcacactatcgcacacgctcacttgcgtgcgcacacacagattggtgacctaggtggactgggagagaaataagagccaaatgactggattttctccaaggaaatttattaatagcccctcttggtttcacctgaaggagcttgtcttcacctgcggcctttgcaggcttaacgcccccagcttgaaacccagaagctcagacttgggcccaaggtattattagtgccaacactacctgaaatgtttcgcacctcataaaaatggtgtgtcagtttcgggtgagaggttgggacgcttcccatctgatttggcccaaggcatgcatgcccctccttctccttcccctcctcctccccctcttccccctaccatccttcctgttttctctccaactctggtgcacagctttgaaatcttgctgagaagcaaatctgtcccttctgctttgaatgtttatttgtggaagttcggcaggggaaccgaggcgggtgccaagacctgccatgctgctgggaagtctgagtctccctcccttccccctcctaaatgcttgttgatagagaaaagtcagcctcctcggcatttgggctcacggttttcctttgaaaatgcttccagtgtggcatgattcagctttcttttctgtcccccaaccactgctctgttgtcatttttacttttctgattgcattttatccgtgtctctttgactacggggtggctggacgttgagttccaggaagaaaagggcccaatcttggggttctgactacatgcgcccatcaatgtcctgtttcattcttggctctggctccctgaattcctgagtcactggggagaagcgtgggtggaccgccccctacccagtgagagttgccacagttgctgctctcctgggtcattggttgcagattgttaaacttcacctatgcatttcaactttcgggtggatattgctacgtcaagtgtctgggaaagcccccacagctacaggattttacagtgaggtcccactaatgacttgatgtcatgacttcctcattctttccaatttctcccacttctccataagggttttgggaaggggagaagagaaaggagtgattcctgagtgccagtaccagggaacagcagggctgttgggaggaaacaaaactaaatcaggaaggtttttgttgttgtttttggggggttttatgaaaatattcaagccacagcaaatatatttgatttatagcattagtattttttctgcctgcatctacaaaaatctttacctattaccatcaaaatatcctctgggtgaatggatttcaacaaagaagaaataaaaatgaaatagaagagaggccccttcgtgcacattgagcctactggctggattgtcacttgcctgccttgatgtcttttcagctccaggcaggcagtaggccagggcttattttcatgacagatcagatgttcttttatggatttacaaagaaagaaatactgagaagtcaaaactgaagtcacttaagacaagagcaggcccctgggaaggctgccattgaggataatgagtcctggggtcctggcctttgttcagtaaatacgcactaggcgcctacaatgtgtgcaccaatgtgtgaggcgtcaggttctctccagggtcagttggttttaagaaaggttttggcttctgatatgttttatctctacagaacagtagctcttaacctttcttatgggttaggattaccttcgagaatctgactacagctctagacctgttccctaaagaaaactaagttcacagggacacacaggatggggctcatggagcagctgaagccagaccccaggttaatagcctttacattaaaatgtttttctacctaccactaatatgcattctttagtaagcggtctcaatatacaccgattcttccttaactctgtttatgaagtattcagcatcctccctgcccccttcagcatcctccctgcccctgagcacaggatccaatggcgtgaggaccacaggcctgggcagctgctggggcatacaggcatctcttagtggctgagagactgggccctggctctatgttggctcctaacttgctgccatttaaaggaaatcttagcctcccatccgtaaaatcgagaaaataagacttgtcctacacagctcatgaaatagtaatgaaattcacattagagaagagatggaaaaacactttgaacaaaaagcattttgctcttataaaagcacagcctcttttgagaggccctttgctccccatttctccttcttcagacccccccagactaggagaaggtctgtctcatggagtgaccttttggctgcctctagattccaagctcagttttgctttcattaaccacagatactgggacggacagaaaaagacctagtttctgttgagccaaagagtctcataacttgtctgttcacatacccaagagcccaccctctagttgagacactcagttccctctcattctgggagactgcatgtctctgtgacctcctggtagagaccgtttgacatgtcccccaaccccccagtgattgagtctgaattctccactgatgacgcatttcctagcactcagggtgtcccctcctggttgccccctcaccactgaagcccgcttcctcccttttcatttgatgcttaacaactgtcagtttgcaagaaacatgcttcaaatccacattctcccagttgcctagcaacaacttccctcccggataaatgtgggtttcctgtagctcagcccaggactgaacacagcagcacacacttctgtccactgcttcaactgcttttcacctctggtctgcatgccttcaagactgcagctcatccctcccttcagaaccttccatagcctgcagaggccatgtctgccccaaaaagacacattgaacctgaggctacttatttacccttgtgttaggtatatcctcaacttagaaattaatactgtttccagattgtcttctttgaatcacagaaagtaaaacaacaaaacattcaatgcttaagacatttcatgtgcggttgggtgacatctgtttgatgaacacatttgatccaaagcatcagaaatactatgccaacaagactttttaggaggtgataaacatgtctgttctaccttaagaaaaaaatattacacagtcccaagggagagacatggttttgatcccagacaacccaagcagagacctcttagggccggaatcatcttggctgctgcctaggaccttatatcaatttcttaagcacaggatcaaggcctaaaggccccttagactgacctcagttagtagaggcagatcccttcacagccttatcttccttagaggtctagtctgaccttgaacttcggctggcagtgctgtcagttgtgatgtgtgacatggaagagttatttgttacttggaaaattaagagaacttatttggcataggaaattgtgtgtgtgtgtgtgtgtgtgtgtgtgtgtgtgtgtgtgtgtgtgtgagatgatgtttgccattttgatctgtgacttttttttccagaaatagtttctcagttccattccaactaaacttacagtctcttccggttctttgacagaaacaattcatgtgaatttgaacagataatagggaagggggaaccaaaagaagaggagagccctgggaaagttattttataatttatggcaacctcagtcaggcaactgtgaacaggtacatatggagggctccctcgggactaggcagtattcagagatgtaaggtgtgaggaccggaccctcatcatttaccattcccactaaaaagagctgggaaggaaattgtagctgtagcaccaggcacgtaactggagcttagtaactatttggtgaaggaatattattaaattattaacaagatggaaaaaagggtattaaccacacaaaaatacatctcaagctattgtttctctgttccctttcccccaaattcctagtcttgctcttatctggctgtctctctagtcactctttcttgctgactctcttcacgttcctttctccacctggaattcctgggccctccccttttactgacagacactgtcctcactctcacagtcatcagtttgtctctttacaaacctcagctcaagtgtcacttccccgtccccaggtgaaactgactgctccctccctgtaagtcaccatgatgactgctatatatagccctcatggaacctaaaacctcaacagacacagtctctttcctactctgttatagtttatttactcattaattaccacaacacgtattattgagcacctactgtgtaccatgcccagaagataaaagacaaacaaaataaaacctattcctatgcttaatgagtttacagtctagtggagagatagatacattaaaaaataacagcaaaccaaaataaaagtggtaaataaatgcactgagaaagacaggaatagctaggaggggcacctaatccctagggaaggaaagctggaagagcatggtgatgggggaagaaggctttctggagaaggtgaggtagtttgaaatgagttgactctggccagtaggggtagagtgagaatggggtgagacagggtgggttggtcattttgatccattagtcctcaaagtgataggactagtggctaaggactgcaggctttacagaagcctacaaaactatttgagatttgaagtttttttttttttttaattggctccaaaagaaaatgaaaaaactttagaattataatgaatgaatattaaatgaatatttaaggaaggtaattttattcaacttcattgttaaatttagttaaaacaagcccttgagtttcattcaacactgttttatcataccgttgatgagagaaaacaaaactgattcctggccagggccactgtcagcgtggggtttgcacatctttcccatgtctgcttgggttagctccaggtactcctgtttcccccacatccccaagatgtgcccattagtggaaacggtgtgtctgcatgattccaacgtgagtgagtgtgggtgtgggagtgagtgcccctgccatgggagggcatcctgtccaggttagattcctaccttgtgccctgagctgctgggatggaatccagccacccatgactctgaactgaaataattgggtgaataattatcttactttttaattaatctttgaaaatgtatgtatagttcacatgtatttcaatatttaatattagaagtattttagtctttattttgaagtttggtgatttattgtaaccagaaacaagctatagaaacttaattttgggccaagtgcagtggctcacacctataatcccagcattttgggaggccgaggcagacgcatcacttgaggtccggagttcaagatcagcctggccaacatggtaaaaccctgtctctactaaaaaatacaaaaattagccagatgtggtgggcacctgtagtcccagctacttgggtggctgaagcaggagaatcacttgaacccgggaggcggagcagtgagcagagatcgtgccactgcactcccacctaggcgacagtgtgacactccatctcaaaaaaaaaaaaaaatagaaaagaaagaaacttaattctggtttatatcaattagcctgtggtaaaattggtttcattatagccatttcacttagttgaagtttccaataacctgtggatgaattaagtgaggatttactatattcataaaatcttaaattccaaagcctgtttgcagttcaggtttttccactttacaaacacttctaagtattcacaatgattgcttaaaattcataccagataaatcattaaataagttgttcaaagtcaaataatttcataagtaaaaattaggagcttttagaaaactatacctacatagacctagacctatagatagacagagatctgaatagatatggacacagatgctttccaaagtgttcatgtgatgtgtggtggagtttcaagaccagagtgtgcctggggcctgcagaagtaaaggagaggggatggagagaagattgtccacatggccatgggcaatctcccacccacactcaagtgaggaagacaggaaacaaattcagaaagaagagaaaataatcaaaactgatgggagcttgtgactgatttacttatgcgcagcctccctggagacatgagtgtggctgttccttaggttgtgcctctgggctcctaccccctcttagatgccttcctattatctaggacctggttgctttttgtctgcatagcttctttggattccagtctttgatgccagcttcctcctaaagtagcctttcagatgtcccttggttaccctctgctatctaagggctcatcctaccccacactcattcccagcaccaatttctggatctccaggctggagatttagacaatgggatgggaagaacccatgatgggtcccagacagaaagtggtgccagccacagaaagggcacacaggcacagaagttggtttggggtaagacgatgtggtcagttcagaacacgctggatctaggcagatgcccagcagacagttggatatgtaagtctgaagctctggggagaggtctaggttggaggtacagatttagaagtcatcaacaaaaaggtagcagattaaatgataaaggaaatgagactatccggggagtgtgcagagtgagaggagcaagggaggcccttgggaacctcagcacttcaggggaaggtagaggtacagttgctggtgggaaaggcagagaagtagcaaagcaaaccaggcaaaagcagtgtcacagacgaccagggaggaaaaggacatgatcaaaatgttgagaaaagcagagaggtttgaaaatacaagaagcaaaaatgtccactagacttaaaaaccaggagaaaactggggggttcttgataaagcatcttagtaggatggtgagggtagaagccagggaagtgttggtgaggaagtgaagtcactgattacggactatgcttaaaagaatgtgggaatgaagggtggaagagagaaattagactgtagctagggagacataagcgatcagaggtagattctttctctcctgtgggagaatcttgcacgtatacacagcatgacgacagtgatggaagggctggcgaagcctcagggagactcttggaggtaaaccccatgaagggaggactttgtttcattcactgccgtgtccccagcacctggcacaatagcagacactcaatacatatttgtcaaatgtgggattttatcatttagaaactgcacctggctgtgagtaacaaaagtcagagaaaccgtgggtttcatttttctccccaggcagagtctggagctgggtcctccaagaggggtttggagcaccacaggtttcctcaagacccccaggctgccctgtgtttccctccttcatccccagcatatgcctgtcatctggtgacctccaaacacctgtgctgcctcctccagcacatccatgttgcaggcagggaccaggcaaagggcagaggggcctacttcaaaagaccatttccagaaaccccatcctatgacttctcctggtgtcttggttaccattgtgccataggctcaccctgtatgcatgggaggctgggccaggcattatgacttttagcaatattgcatagataagcatcaatctttgtcactgtgacgaagcctagtcactcagtgctaggcaaggttaatggaatgggttggtgtgtgcattattcttgaggtctttcttatgcttcatgttatacatttattaggacgtttaggcaacagggggataaaaatgaagaggagatgcatgctatgatctgaatgtttgcatcctccccaaaattcatatgttgaaatcttcatccccaagatgatggcattaggaggtggggcctttcggaggcaattaggtcatgactgggattagtgcccttgtaaaaccccagaaagccagcttgccgcttccaccatatgaagacacagagagaagatgccatctacgaatcaggaaatgagcccgcaccatgcaataaacctgctggagccttgatcttagacttcccagctgccagatctgtgggaaatagatttctgttgtttacccagcttatggtattttgttgtagcagccagagtgaactaagacagtgctgatctcgtattcttggagggaacccttagtctttagggaaagcaaagccaccatttggggcagggtgttctccaagtgctgccacatatgctgatgtggttaaactgcaaactatggtaaaaatgtggaggtctgtggaattgtcaatcaggaaaaagatataaaaagaagttaaagtcttcgtgcttctggaaggatatgtgccaaattgttaacattgattatccttgggtagagatgtggggaagtttgcagagacagttttgccttgtactttatataagtaaacagctactacttcgttgtcttaaaaaaaaaaaacagcctatgtgctcttcatgtgactcagaactacctaggcaatacgattaattgaattagtaaaattgagtgattatgaattttcaggaagtcattaatttaccacttctttattacatccacttctaacaggacttcaatataggggaatttgacttcaagataaaaagaccaaatttatttacccttttaaaaaaagacaacttaaaagcagacttgtcttacagaaccttccttagttggacatcgatgagtgtacagaaaatgcaatggataaaaagcttggtgatacaaagataaaaagtggggtcctgtccttaatgaacataccatttcatggagtatcaggtgtataaacaattataatcaatctgcttgttattctgataagatcatttactcacacatcaaatactgagtgcccaccacatgcccagcatacctagaagtcatccagtatgatttctgtctacatggagcatagagtcttacaggggagatagatgacaagtaaacaccagaataattaccaatggtgaagagcacaaggaaggaaacagaactcctaaagagagcgtggctgggcaggggtgagcaagaggcatagaaaaaggggcatctaaatctacttgggaggaagctgtttctcacataggtcatcatgttaggaatgagacttgagggatgagtagaagtttgccaggcaaagaaggaatgggggggaatagagagcagagctaggggcaggagacagctgacgtgtgagcagacataaaaagaagtccactgtggcagcagagaagcaggagagaaggcaagtgagggagccaggcaccagctcacagaggtcatgtgtgtcaaaacgtagtaatggccttctcttctggagacagtagggagccatggaagatgtttgagcagggaaagcgacatgactggattggcctgttgggtaactcagaccacaatgcattggaagggagggggctagaggcaaggggactggcaagaaggccagtcctttttctatgcctattttgatgaaatattctagaagggaagtgaacaaaggtagtcctagagaggaagaacaaaacagataggatacttccttagtatttgctcattcgacaatttatttttgcatatacactaaaaccttttttattattaaaacgttttattgtaggaaaaaagtatgaaagtagagtgaataataaaatgagctcccatggatctatcacccagcttcaactattatcaatatttggctgttcttgttttaactgttctccacctttttttcctgaagtttttttgaagcaaatcacagacaacatatcatttcaccatatgtacttccctctgtatctctaacatgtaagaacttgttttaacaaaatcaccatgctatgatcatacccaacaaaatttatcataatgtcttaataatacctaatacccatttcatgtccactttcccccaattgctacagctggtttgttcagatcagaatcaaaatccacctgtggccattttactgctatgtctctcaggtctcttttcatctctaataatctcaggggagacaggagggaggacgggcaggacttggggctaacttgcttatcgacacacagttttgcctacttgcttcctcccttcacacccactcttcttctcagccccacccttgtatggaaaaaacagaaattaaagtgctttgcccagcacccactgaagctatttcgaaggagtttgaagagtactcccggcaagacaaatgcctcggtccagtgctcaggtcaaagaggggagacgcttctcagtgatgtggtgtcaatagcagcttagttgttctttcctctggaaaattctacccatctgctttgtaactcccatacctaacaaggccttttatttcacaattagaaaataagcctgaaatatgaatgctgcctgagtgtacctacatttattctagagtttcagggtcaaaaagaatacaaggacctctgcatctacagccaagaggagaggggcaaagacacacagctacaaatgagaacctggctggtcaaagcctaactccacctgtttgtcagcactgatgcaagttaggtcagcccaatgatcatttaggagaactgtgctggcaaataaaaagcagaggcttttggtccccagatacttggatgagaattacaagtccagctggttaaaaggcacatgcccagtgctcacttcacacctactcaggaagcacacttgagttggaaaaccactgtctttacacttagaactcagtcctacatgactcctctaggatcagtgattccatcagttttgaaacatgaagcatgaagtcaaacaggacatgaccttggtttccagaaaaccagatgttcacatcagtctctggagcttggaggcagcacacctggggacttccacatcccctgccgaggtggcaaaagcaggagcagtggtgagttcacatgggctggggtttcctgaacactgctggcaattggagaatctgcaagggaacttctccgactcctaccagcagctgctttaaaataaaggtgatgtagctggtcaaatcctccatgagagagcagtgttgaatggaggaagagacacaacctgtctgaaaatggcacaaaggaagaaagatgtaaacaatgacgagaagactgcagtgtctacaaagctccgaggtgaacagatgggcaccccaggcccgcagcacttccttcagtctctgccagctgcactctgttttccttcctccaggaatcttgtttggtgtcactaaaacagcaattagaatcactttgaaatagtgatagtatttaatataactatgaaactatctgtgattgacaagtgcagcaaggagtcttggaatgagagcctttattttttcaattaaataaaagagttttttgtttctaaaagtaatcttgcagaaaagatcctgcgatcagaaagaaggagggggggagttttcaaacatataggagatcagactgtgcctatgtgtgtatatacctacaaacatatatatatttaaaaaattgttttactgtcaattacagcttcccacactcctagacagccgttctcaaggtatcaatctgagatcttggggaggaatattatctgatatgtcaccaagaattcaagaggtgagtagcctgatggtagtaattataatttcattatgtctttccaccatttaccccacttatgtcaaataatttaattgtatttcaaacctgttcaaggaaaagtacatttgatctttccatctagcaatttcaaagcacctgttcacatcccaaattatctgtgctcttaagtaagaggcagaaagaaaggaaccacccttctgatttcacatcaaaaaagaaatgccactggcaataagcaacttgcctggtgtggcataaatcatcagaagacttacagttgaatctaagtcttttcagtactgaggtggttcattattctgttacagtcttaaaattcacataaatatatactgccaataataatagcatacacctttatagcttacaggcactcttcttctaagtgttttacctatgttggcttatttcatcataaagaaaacaatggacttttgtgttgttttgtaaaaagatgcgcacattttaattaacatctgattgcacaagtctcctcccatatagaaatggattcttccacgcaatagataagaggtgctggggatatgatgatgaacacacagatttggtcatgaccctgtgggaaagagagatgggaaaaaaacaattctcttcaagtgtgatgagtgttacgaaagggagggaaaagttgaaacaggtttttttccaaacttttctccctccattattcgcagctgacttgggctccaccaacctggaaaactgcatggttggaatctgtctttataaaacgcatctcaacctgggccgagtatgcacactgatgtgggaaagttagagaagagcccattgtactaatgctcacctgctacagtgggagtctctgttaaacagtcttttcttcatagcattaaaaaaatttatatcactacaataaggttgaaattgatagagaatgtacaaacaatccccaaagtatatcaacactcttagttctgagtagaagttccagaaggcttcttgactgtctagatagcaagtctaatcatttgtgaactaagttaaagcagaaggcccagtttatatgaattggtattacaccatttgacctgagaacagccccttcatctctgagtgctttgactaaatgagcaacataataatagtaataaccccttacaagatgtcataagactcactgttgttgaagcaatttgagattttgactttattgaagcatagatggtgattataggcatgactcactgtgtggattctccctgggctcatcagtttcagagggcaagtgttggcatgtggacaaagagagggatgacacgtaaacatggcttattgcaatggggaaatattttcagtctcactgattgaatcctaatggttttataaattccccagtaccactgaaagcaaagcaagtaatcaggtgtgttttaggaataaaagcagcattattttaatttcgtattttcccctaaagcaaagccaaatggcattatgggagccaagctactggcagctccaccagccttctcctgagttctcggcattacagatctaccctcaaaggatgaggccagcaagcaccacagggtgcccacatggagaagagaaggccaccaacctcctcttagctggcacagaattgaaaaagtgtttttccaggaatggatacttcatctgttctgtatttgctagaattttaaaacgcacacacagacacacacaggcgtgcacacacacacgcacacacacacgagaaaaccacaaaccacacatttcaaggaaatggaagaattcattggtaaaattaagctaataagattattttccaaatataagaaactaaattttagactatttagccaaagaaatttgctctgatcttgcttttctacaacagaatcattccccaatcattttatttccctctttttctccccagtatccccatcttggtgggacaacagaacccaagaactggcttaacagtaaaatattttctgcatttgcccaaggacacattcccaacgaattcaaataaaggagactagaagaagagaggctatactacagtgctctaggggtcactctgtgatttgttgttgttgttgttgttgttttgagacggagtattgctcagtcgcccaggctggagtgcagtggcacgatgtctactcactgtaagctctgccccccaggttcacgccattctcctgcctcagcctcccgaatagctgggagtacaggggcccgccaccatgtccggctaatttttttgtatttttaatagagacggggtttcaccatgttcgccaggatggtctcgatctcctgacctcgtgatccgcccgcctcggcctcccaaagtgctaggattacaggcatgagccactgcgcccggccactctgtgattttctttaaggctcatcctagtattctcctagtccctaagtagatggcagtaggttttgttttttgtttttcgcagctggattaaggattgctgagaatatatggatgttttcttttaaatgtggaagtcaaaccaaacgttggagcattggcctcacagcagattatgactctagctgccttaaaataacctgaagactttgccttgccctagtttatccatcggccgagtatgcaggacttgctgtgggtgaccaggcccctcatgcagaatggtggtccagagacctttacaaagctgatgggcatcctgtctgacctcctgtgtggctaccccgagggaggtggctctcgggtgctctccttcaactggtatgaagacaataactataaggcctttctggggattgactccacaaggaaggatcctatctattcttatgacagaagaacaagtaagttttctgagtcctgcttataaattggcctctcatgttggttaagttgatggtttaacacttctaggtgaaaccaaacctggggttgcatctgtcttgtcttgctgagtggccttaggtaaagagacttctcccagaaagtccacttccccttgcagaaagggggcattgcttataagcaattctggacatgaaccacagaaagaactgaggcccacttggaaagggaacagaggggccatttcccactgatgtaattgaactagggctaagttcaagaggaagagaatgatccgcaaggaagcaacccagagttccaggtgaagctcaggtcagaagggccctggcaagtaaacacggctgtgggatgcttttacaaacacaatatcgtgaaaatctatgtgtgtagtactgaattacattccaaatggcaaattcctggcaaatcatcttccccacctttcactatttttttttttttggtcttctatggggtaaaggaggatggggtggggaagaaatgtaactggctgcccctctagttaaaaactgaaaagaggcagcaagggacatgccaaaagtagttggactctaagatagctacacacaacaaagcagctaagcagctaattgaagggaaattactgaggctcaagctgagattccaagcgggggccttgtttggcctctcagtccctttcatctgagaaaggcctcagttcctagcagtaatcagaggcaggcttctcagcctccttctcctaaagcagaataaaccacagggcaagtcgcatcctttgtttctctgatgaggccattactgagagtcactgtggcattttgctactaatgatgagcttgttattggtggggtacagcctattaatttaggttattcatcaaatcctccagcatggagttgaatgagacatgtgatgtggatacactaatgactatattgagttacaagcaatggggagtttctgtaaaatctgtcccttgtctcctggcagcatccttttgtaatgcattgatccagagcctggagtcaaatcctttaaccaaaatcgcttggagggcggcaaagcctttgctgatgggaaaaatcctgtacactcctgattcacctgcagcacgaaggatactgaagaatgtaagatcccagctgggcttgccttgtgtaccctggacctcccagaagtgtgtgtgtgtgtgtgtgtgtgtgagagagatgtgccttcctggtagcacatctcatgtttgttttttgctaagtggactcttgcgtttcctcccccatccacagtcatcactggaatgctttgcttcagtgcccctgcctgggccctcccctctctactgcagcctacaatgaggttttctttcccattgcttgaattatatccctaatggaagggttcacaattctctgaatcctggctactcagataaagacagggaggaagggaggaagggtattttctcccagggggtccaaatctagctttaacgagggaggttctgagaaaataatatcatcaatattacatggacttctgagatactaagaaattagattctgtcagcccaggaagttgggagatggtgaattgttctgggaaatagcaatagactgagaaaataaaaacacttccttgaaaagcctttccctaacactaagtgataggggcagaaaagacacaaccaaaagttctctctcacttttctctctgttcgtgtctctgtcttgatctctgtctggttttaggccaactcaacttttgaagaactggaacacgttaggaagttggtcaaagcctgggaagaagtagggccccagatctggtacttctttgacaacagcacacagatgaacatgatcagagtaaggggggttggaggatggggaggggaggggaggaggaagcggtgggggcaagaaagttccacttgtttccttttcccaggaaagagttaatcgctattggagttagatcaaaatacaacaagcaggccccaaaggccttcattccaagcagtcaccaagtggggtcactgactttggatgagaaatatgtttcttgaattctgggagaagtctaaaagctgccacaagaccagtggcttcctggagtttcctacttttatgaattcactcaagggcctcaaattcaaagaggcatctccccaaggggccagctctgtaactccaaagatggtggaatgtgtttgtctggtctcattttcagctttgcaaaatgaagacaagagttctatatatcagggacactcaaaagaaaacaaaaatatccataagcaaaagaaagctttttatacaccatattcaatgacccccatctggcccctcctttgcccctacacatcttccctctattctagagacccatggacttggggaaatgggatatagataggtatgtttcatagtggaacaagctcaccagctcttcagggagccttagcatctctatcctcaatcactaaaaattagaaatggctgaagaacaagaccaaagatcctatggaatttctaagcagagcagtgactgtatttcttcttcccaaggataccctggggaacccaacagtaaaagactttttgaataggcagcttggtgaagaaggtattactgctgaagccatcctaaacttcctctacaagggccctcgggaaagccaggctgacgacatggccaacttcgactggagggacatatttaacatcactgatcgcaccctccgcctggtcaatcaatacctggaggtaaggggctgcaagccccacagtgggccccttgaagatagccccatgagtggggccagagctcccttagcaagtcaagtggtcttgaatttaagctttcattttccccactgaagaaacaagaatccctacatcccctgtacagttctcattctctaacagcttatccatacttaaaacttatctatgctgaaaacggtttcctcttcacatctcctacttctcatgctgggcacctcctcctgtagccccctttaagcatctgtgtctgtcctcaaccctcttctgtctgacattgcttgagtggccatctatggccagtgtcccctcaaccccacagtccattgcttgctggacactcctgccctcaagttctacaagcacatcagcctcaacatgtcccctccaaaaactgtatgttctccttgcccatagaacatatccttctcctatatttcctatcctaattaacgtcctcagcatttgcccgaattctcaagtgagggatttcagggtcatccctaattttccttcttcaccctccacacagtagctgtcacttactgagtgttactttatgccaagtactgtgccaactgcttttacacacatatgcttcatttaattctcacagctccatgaggcttgcaccattatcattgccaatttgcagatgagaagccagggcttaaagaggttaaataagatcccacgcatgaccattaagaggagcgaacaggatccagctctgggggtgcctgagttcagagcctgcctttctgatttctcttaccaagctttgtctcctctccctcctaaatatctctcaactctgcctcttgcattccaggctctctgaggactagaggccttgtcatctctgcgccagcccattccaagggcttccttcctggaatccagggtccagcctctgttggcccaggcatttctctacactggcaccagagttacattccgcacacctgcttacgttgctctctcacttaaaatcttaatgactcgacccccaaataacacaggtcccttccaaatctgtcctaccccaccttcccagcccttgctcaactctgctacctggccctttcacgcctacaggcattcccattccatgacctcttgggattctaccctttgcaaatgctgttttcattgcccatttattagagcgcttttggtcacaagctttttgcttaaccaaaaagaaagcatttattggtggacataaataatgaagttcaggaggatccaagagttggaagccaccatgagacccctgtgtccttccacctcacttttctactcgcctctgctcagcttcatctctggccaggccctctcctctgctgatgccctagctgcttacagcccttagcagtcatctatacaccaaaaatccctttcccatagcagaagcaatgctcctagagagtttccctgttggtctggctcctgtacccacccctgtgtactctgattgggaggcctgggtcagctgcccaccatggggccatttctatgagcaggattactgtgaagtggaggaagatgtttccccaaaagaagaaacacaaggtagaaaagtgtatgtccaccaatgcctgaaatgactgtccctttcctcatctgctgagcttctactcattcattctttgagactcagcactcagctcttaaatgtcacttctgctttgatggaggtttagtcattcactcctctgtgcttcctggccctctcttcacacctctctcagacccctctcccagatagattagagttggctgttgacatgtccatctctggctgggcagctaaactggagttatttagaatcagggagcacatgtcagtcattttcaaattctcaacctcatactcccagtaaatgactccatctaagggtggaccactcttgcccatgggccaggtctgggtctgtgtcatctagaactgttggaaggtaggggcttctgtgagcagtaggagagggaataaactcgagggccctcgggagcatgccctcttgtctcagacttgtgagtcctgaggataacaaactagtgaagaaaagcctcgttctatctgtcacctggtgctcttgaggactttctgttgccctggtgccaccacaattttccagagtgtgtgaccctcgctctccaaactctggaagtggcagccgaggctccccagtggcctttcagaaggtgccagtcatgacagcagcaccaaactgcaggcaactactaagcgatcaccaacttgtctgaagataagaatgaccttgaatgcattttataaaacaggattttttttttaatttttagattttctttctttattttaccttaagttctgggatacaagtgcagaatgtgtaggtttgttacataggtatatgtgtgccatggtggtttgctgcacttgtcaacccatcatctaggttttaagccccacatgcattagctatttgtcctaatgctctccctcgcctcgcccctaccccaccccaacaggctccggtgtgtgatgttcccctccctgtgtccatgtgttctcattgttcagcttccacttacaagtgagaacatgtggtgtttagttttctgttcctgtgttagtttgctgaggatgatggcttccagcttcttccatgtccctgcaaaggacatgatctcattcctttttatggctgcatagtattctatggtgtatatgtaccatattttccttatccagcctatcactgatgggcatttggattggttccatgtctttgcaattgtaaacatacatgtgcatgtatttttatagtagaatgatttatattcctttggttatatacccagtaatgggattgcctggtcaaattgtatttctggttctagatccttgaggaatcacactatcttccacaatggttgaactaatttacattcccaccaacagtgtaaaagccttcctatttctcaacagcctcaccagcatctattgtttcttgacattttaataatcaccattctgactggcatgagatgatagatacccatttgtcagatgggtagattacaaaaattttctctcattctgcaggttgcctgttcacgctaatgatagtttcttttgctgtgcagaagctctttagcctaattagatccatttttcaattttggcttttgttgcaattgcttttggtgttttagtcatgaagtctttgcccatgcgtatgtcctgagtggtattgcctaggctttcttctagttttcatgattttagattttacatttaagtctttaatccagcttgagttaatttttgtataaggtgtaaggaagggatccagtttaagttttctacatatggctagccagttttcccaacaccatttattaaatagggaatcctttccccattgcttgtgtgtgtcaggtttggcaaagatcaggtggttgtagatgtgtggtgctatttctgaagcctctgttctgttccattggtctatgtgtctgtttacaaaacagattcttaagcatcaacccagatcgactggctcagaatttccagggaagaggcctggttatctgcatgtttacagacctattagatttgtgggacctgcagttcccttgtacagttagttactcaattaacatctccctcctctcatggtgcctctacctgctaagcccttattcccagccaggcccaccaccatccacccactgctgttataacataagcaggacctgtgcgagggggtgtggacggaggagagaggctctgttgcttcatttgtgcagcatggagttcagtggttctcacaatgtttttgcaaagtatataaagaatactccttgtctacttgacattcgtatcgtgacataaatgtcttgttttccagaaggattattttttccaagcagcttgttcctaatgcagccccaggcaccaaacagatacttaaaatatattaattgcttaaatggttaagaattcagtctctggacccacactgcctgggttcaaattcctattatctgtgcccagtttccaagtctataaaatagggatattaatagcacttacctaataggctcgttatgagaattaaatgagctaattcatgcaaagcactgacatatagtaagcacttaataaatattagctttttaacaaaatacaagccaaaaaacactgcttaggagaggaaatgatgttagtgcctcctgtaaataggcccagcctccaagctggtgctcctctaggaatcacaacgctgcaaatcacatcctccggggccgccaggacttcacgagggcctctgagcagaggggtatgatgggagcagaagcccagcagctgtgatgatgtggtttctgatcttcctgcccttggggtgggggaggaggaaagcaaggggcaatgaacagaaaggagaagatagcggggaggaaatgtgtgaggaagaaacacatcactgtggcttgtcctggatttttctgcttctgttctcgtgttttgggaagtctggaggagacttgaaaatcattcatgtccccaccctgaggatggcttagtagcagagaggccatgaaaactctttgctgatggctctgaaagcaaggatgttgcttcactgggctgctgaaggcctgcctgggggttctgagcagagagtacaggcccctcccaggagggcggcctaaccaccatgctggcatttctgtggaccatggtctgctgtctcagaccccctccacaatagggtctgcaatctcattcaccccataaatacattctgtctttcctctgatcccctcccattagcagggggaaataaatggaagtcagacggcccagttagaaggcaggcagtggagtaggaaaatagatgatggtggtttggggagcctcacatcactcatggggagacattcattcccatgggccttccaatcacccttttctccaaatctaaggacacaggacaaatgggtcctcatacaggcaaatatcttaaactggtatgtgtattcatttatagttctaatttatatgtgtctttattcacatatattttgcttctggagaaaagctcaattagaaaaattaatacattattcttcttattgcccttcagctaaaacaagcatacacacccctcccctttggattttttgtttagcaaaaggttaggcctggcacagatgaaatactattcagagttcacagtgtattttcatttcataatatatttgattttcaggtcttgaatttcacatcaggaagctgatataggaagctgaattcagccagattttaatacgaaaatacctctgatcaaggcataaaattgtactttaaccagtaaccactgtatttctctaagctgtgaaaaaacatgcattcattaactgctttttcctctgctgtcaacacagtcaatacatgtgcataactccttattgtctacatggtgattatcttgctgatgaattctcaaaggccagagatttggactattttttctctgtaaccttgcatgttcctggccacatgccaccaccacccaaacagaatgtacgcagggaatgtatttttcaggataacctaagaaaaaataggattaagaagataaagctgctgatcatgtaatgtactttagactcagatatataaatatttgtgaattatctgtcctatttctttcttctattaattcattgactctagatgtgcattggaaggctagggagaaatcaggggatcgtgagaaagagcacagaagtctgcatcacacaaacaatattatttcaagagccatgaactagatcctaagcaactcataggcaatgacctcatttcatacctctagtctctaagaaacatataactggcctgaggaaggaaaatgtgggcaaggggtagaccggggtcatgggtggaggtccaaatagtaatcaatggagctcatagggtggactgatattgaagctgctatgagccagccacatgctgggcactgttacatgtcatctcatgcaatactcccaattacctgcctagtaagcataattgtcattttatagaattaaaaacagactcaaagaggttgacagtctaatgtaacacaacagctaaatgggggatctggaattataatccagagctgcctggctctgatgagaaagctctttctgctgtcatatgcagcccacattaatagggggctcagaaagtattctctggataaattatataatgaatccaatgaaggaagacattattttataatatgcagcataataggcactattatgattggattttcctgcttgaaagtagctagattagagtaggaaaccaaaaagatgtgaattcattcagtcattcatgcatttgcatggattgagctacctacatttgaataaatgctgttaatccctgattccttggaagctcacattggagagataagcatgtcattaaataatgccataatagtggtatctcagaggactagcagaacataattcaatctgacagagtagaaacagattgtacaaatccaattcaaaacatcataaatcctctaagcactgtcaattcttcctccaaattatctctgaaattcctccttctttcccatttatggcctccatttacagaagcgtgtactgtctctcttagctgtttgccaggccgccagtctcttgctgttcagctctcaactgcttccagcaagatctttctaaaatcccaggcttgccaagacttagcgcccacagctccacagtgactcctcattgctgttaaggtaaaggccttcccagtctagcccttcatgcttcttccatgttctatgggactgccccaggcttcccacctggtaccactgagcctttccatccttcccccactcgactgccaggtcaacacccacacccacgcttcaggactcaggtcctatgtttcgggccttcttctgtgcaccattcccttccctgtagcccttgatcatgatttgtttatacgcctccgcaccttcatggccctgaacccctcaagggccgaaactgccttacttttctttttgacttcccaacttaccttagtggagctgtagtcacatagaatagacgctcataaatgcttctctgggctgtaaaggttgaattttccagctaagcaaggaagaaagacaatttcaggcaggaggaagggcataagcaaagtgcagagatgtgaagctcaagagaaatggatgggctgggcagaggtgtggctgcagcatcaggggagaagaagtagtgcctggagtcagcaggcacggcttgcaaaagcttcacctataggtgaaaggacaccatctcttgcaccaataggctctgtgattggaggcaactttgctgttttactgccagaaaactgaggatgataacccaaactgcagttcaagtggcattcactggtgtggctgaaatgggtgtttgtggccagaatgtggtctgattggtcagtgcccagctctgttgattagcagatgttttgaatatagtagcatccatgtgcccaagttgttgggatgattcaacaagaaactttaagagctcaagtgccctgcagttgtcagccaggtgattctcttcctttggacccagttagacgcaggcattacctcgtggctttgccccagtgtgaatctttgtcctccaacttgatctttttatttgtttcattattgtatttaagttgtttattttagagacagacattttttaacagctgtgcatttcctgtccctttgttttccagtcgtcatgtgtttccttactctctgtgggtgaacgtttcagatgtctgtttgcggtgcccagcgtgcaagataaaatttattgcagtgccttcggcctctaactcaccattccaaccaattcagatagcccaaggctgttttatccagtggatttttccatgtagtgggaaataaatcttgaatgttactgtttagattagccaggaaactcattctgggatgtttgcccacatccattggcatttctcaaaaggaaccccaggtgtctaccttgacaccagcagggccacttgagccctccgctggcattcatcgcccgctttgttctcagcctgagtttaggagttacagatgtgagaggcgggattatacagccaacatctctaagcgggcagtggctcccttaccctcgaagacctcactcctagcacgtcctggatgtattcgtcaaaatatgtcctcttatgccacgtcagcacagggttgctccccactttgatcatcaagtttaaacaaaaggaaagattttctttctttctctgcctctactggacatcatttcccacctaacagataatttaatgtatctgttactgaatgtgtttgaattacagacagagaggtcacagttaaagaaggaagcctgctgctactgcagcttgtcctcccaaggaggtgtttgatttagctgtgtaaacaaatgactgcattctccagaggtcctgaacacagctgcctgcgctggagagggctcaaacctcttccgccagggtgaactctgcttcctggtgagtgccagcaaaacaaccaacaaagagctgtaggacttgtgtggacttcaaatggtggtggtcctgccacttgggctcagccacagcagttaggaaactaaaggggaggaggaaagccctttccttgctttattgtcattggctgtcatagggcattacaatggttctctttgagattctgagctccggctataacatttgcccagaatctgcctctgaggccttaagacactgtgtttttattcagcaaagatgccctttgactccttttcccactagtggtgctaggtttgagcaccttacactggccccttacaatagccagttcttgtctacctacattcttccctaacattcatgattgcatagttactcttagtgtagaagcagacagcttttacacatagactccatggccgtagcctcatagaacctactatattctaacttgcaagctaatcagaccaaatatatcaaaatcaaaaacctctgctgagagtttattcattcatctctgtctcccaaacgtacttatgtacatacgtgcactaatatacatgtccattagccaagattttgatttcagggatcaaagcaagtaccaatagggaatgaggtcacttgctgcatggcaggtggcttccccatgagaatgcaaggccacctcatgactcatacttcagagggtgacccaggaacttctgattcatgtccaaagcagcttctacaattgctctaccttgatctagggaagatgtggggaggatgacattcgggattagctttataaggccttcctgtgggcagagttgtctgactttcacctagtgatcaacaagcagctagcaagcatcagtgtgtgaggccccacgccctctcagctcccctactgcccacctgggacatgggctttggcatctgtccatagcattgttctaaccaaatgaggtgttatggatcagctcaggatgggatatgttcccagacatattatttaaagaaaatagctcccttcctcccctgataaacagctgccatggctaaaaggtaacctggctggggcttaaaagtctgttgactttcaagatattttgcaaaaacagtcataaaaatggtatttatcagatcctaactatttgtgagacggtttggtataccatagtggttaaaaacacaggctctttccagaggaggtttactttgcttagtcgtgtctcctaagtgaacttggacctcataaggttgttgtgagaatgaaatgggtgaatatgagtaaagtccttggaccagttttggccgtatagtaagccttcagcaagcatctgcttttattcctacagggaggcaattgtaagcccttcacaaacagcgtctaatgtgatccttagaacaaacctatgagatagggcatatctcaattttgtaggtagggaaacagaagccacacaattaggaaatggcaacagatctgttagactcttaaacactatgctacaccaatttgcaaggcaaggaagacaaagcacctttgaaaatgggtcagatgttttagggtaaatgaacgtttgagaatcttttaagttttttttcccccagagattatcaaggtatcattgtagggggatgcatcaggaaacatgactatgaatcagctgcctgataaaccagccaggatggagcccacgtcatcacagcagtcagcaatgccactgaaaaacatcagctgcttattcccgtatagatttccccttaagacatgaaaagggagttcaaagagaatgggccagatatctctgagagtcatattactaaaatatatttatttttactagcttttttgttttaagaggtatactgtcattagcactgtagcaaaaattcacgttttattaatttctcctagtttatcatgtgattctagggtaggatgcagagttatattcaaaatacacaaatcaactcaactcagtaaacatatatcgaggccctatcatgacaaaatgctattctagagaccacggcgaacaagccacggccccagcctcaaagaatgtactatctttggaactgtgctggccaatacagtaaccagcagccacgcagggctatttaaatttaaattaattaaaagtaaaaacacaatgcctcagatgcattagccacattttaagtgttcaatagatatttgtggctcctgcctgccatattggacagggcagatatagaacaattccatcactgcagaaagttctactgaacaatgctgctctggagcagaagatcttcttgttcagggatgttacacccccgcttgtggctagagtgtggcttatcctcagagcaaggataggggaaccatggcactctgcaggctcagcactgaagacacggatgcaggctctgcttctgacctagattgaccttgggcaaggccctttgctcctctgatcccaatttcttcaccagccaagtaagaacatcagaccacaagccctctagggctctgtccaaatgccccatgactgagtgaactggtagaacattctatgtgtgtgtcacaacatgaagagcaaagactttcatctccccaaataattttgtttttcgttttaggaattaaatttcagattcactctaattgccaatactaaaattctctatatgcagttctaaacttgacaaaccaataaaaaaagattatttgactacttatctttgtacaacattgaggtctccctaaagcaaatttaaatgcatattttaaaaatgtattctagcagttcagttcagaagccccctggcccaagcatcacactgtcaatcctttgtcctcaagcagcatggttgggtgggttaagtactgacaaacactgggtgtcaggcccatggtcagggactgtgctaacagtctacatattagatgccacctacccccaccctcaacagacccaaactatttatccaatagcaaaccttgcattatttctgtccagaagaaacaaacatttattgacaacttttggtgtgtgacctgtttaagtcctacatctcatttaaggactggtcaatgttaggctaggcaatgcctgtttgtgagagaatcactgcctaaagaaaattctccatttcccttagctctatggtgggtgactacacatactggtatttcttaaagaaataccaattccatttccttttaacataattattaatatctcattagcatggtgtcactgaagcctgggcccaaagaaataccaattccatatcattttaagatcattattaatatctcatcagcgtggtgtcacttaagcctgggccctttagaatttttcatgtacctgtgttcctctgcccatatcagctggaacactaatagttttcttcctttttatctagaagactgagaacattacatgggacctgcccccagggcatggaggctgaggtgggacagtttagttcaggaggcccaagaagtgttgggtgtgcagccccttgttcaaacacagcctctgaatcgccagaggcttccggtgcatactctgaggcgcaggtgggactcgggagtgagaggtttcggcgaatgaattgggattgcctacttcttcccagtgcagtggagcttggttctgtggtcaggtccttacgccctgtctgcctttctcgtttctttatttctcgggtagtagttgtggaatcaaatgacctggggtttgatacctactctaccacgcctctgggggagtcactcagactcgttgaacctaagttccggggctgccaagtgaggataagtagtaattgctgatccacctacttgacaagatagtagtgagggccctgagcgccaggctgtggatccagcctttcccacggttcctggtgtggcaggaagaactctaggcctgaaggtgaaattggggagggagtcccagctctgccactgtctctctgggtgacctcaggcaggtctcctcaaaaaaataagatactttataaagctcagtttcctcttcagtaaaatgaggattccaggtaactcacagatagtttgtggggatgaatctgttccttaaagcctgcagtacatcaataacccagtcttcctgcttgctttcccccctctccactaccagtgatcatagtctgatcccataggtgatatcccagctcaaaaccctacattagcttctgtggctgtttaaggcctgcccagaactcccctggtcttagcactgaaagcacgtgtccggggaagccctgcattggtcgttcatactactgagtcccgcagggcaaaccgtccggtcccaccctcctttctagtgctgctgtcacactcacctcccttcaccctacactcccttctgtgccttgcaattacctagggagttttttacaagatatggatgccctggccctgccactagagattctgatttaattgcttggggtagggcctggcataggtatcttttaaagctccgcagtggttctaaagcacagccacagatgggaaccactgatctattcttgtaggtccccagatacctcatgtgctgttccctgtgcctgagctgacctttcccccactttcctctcctcggctaattcctgcttatcctcctactcaggaggctcttcctccaggcagccttccctgatccctccaggaagacttagctgcgtccctccgctgggcttccccaatacactgggcttgctttcattagaacctgatccttccacattatggttgttggtttgctccaatcctctccctcattagctctcaactttctttcaggaagagatgtttatctttccttcttgtattcctagagtcgaccaggctctggcacattgcagattctcagtatgcattcagggaacaacttaatcaagacaagaccatctgacttcttgtgagttacatgctaagaaagaaatgtcgacaccaatagccctcacaatgataggaacaggaggttaaagaaaaggaaatagatgcaaatagcaatataagtgctttaacaaatctatacaggaggacaaccatcatattcaaattttcaaacattcttagttctgctcttttgtgggtaatggtttttttttttcctcttccaggagaagaaaagaggcatattatagaaattcctcctcccccagcattacttgtcacagaattgtaattggaagtgatttccctgactaagttattttggctgtctgttattttctctcttcctccttgctcttccctcagctggccatcctgtgtgtttggagagagccagaaaggttcaaggctaggaatgtttctctctctctttaaagctctttaatcgtcaggctttctgatcttcaaagcaggctgtagccagtgtgaccccactccctcgcctccccatgctggagagtaaaagcctggagtatttttgtcattttgaagacttgcatatttggacagccttggacatctggaaagtgtggtcctcactagctctgcagggataagagcacgtcagcacttccaagctctctggcgcccctacatctggacacgttgaaaaattaacaccagactctggagttaagcaaacattaagtttataggcctccttgcatttgaccatttcctgggacagcagcccttatcctgtgactttctgtgtgtagagttgagtctttgcagttggtcctcctcacactctctcaactttgtgactctctgcagtgcttggtcctggataagtttgaaagctacaatgatgaaactcagctcacccaacgtgccctctctctactggaggaaaacatgttctgggccggagtggtattccctgacatgtatccctggaccagctctctaccaccccacgtgaagtataagatccgaatggacatagacgtggtggagaaaaccaataagattaaagacaggtgatgtttcaggaagggctcgctgcatttctccaaagtcagtgggaaattacatttggtagagagaaagggattgagactggactcataaatcaataaaattaagttaaataagaaaaaataagatattttataaagctcaacaaagagtccttgaatgaaagcaattacagagtcacattgtggctaatattcaaaactgagatttaaactgaggactaggaaatagaattggatccttttgaagcgtttaggagaaagattttaagagaatgagttccgagtcaccctgtggtcgggaggtgtgagtgagctatccaagcccgttcccatcctttgtccctctgtgtcttctcaggtattgggattctggtcccagagctgatcccgtggaagatttccggtacatctggggcgggtttgcctatctgcaggacatggttgaacaggggatcacaaggagccaggtgcaggcggaggctccagttggaatctacctccagcagatgccctacccctgcttcgtggacgattcgtgagtctgaagttcgcgatcctcctccatgacacgctaatgggggtgctggagtgggctggggtgggctgggggtgccctcaaggcttccatgtctttagagagagccccagggaccagagccaaattggagagcatggagctctgactgaggaacctgcttctcccaagctccaggcaggcacagatgagtcagtgcagtggtgggaaagggaaaagagttgatgttgtagctggaaaagggaaggggaaaattaaagcaaggaaagtgaggctgggggaggggacaaattccccactatgtagtatgtttggtatgtggaagggttctggtcagaatgtttgcccaatgattgccacatcagcattcattttggactctgtatggccagtaggtctggttcctgggagccctggaataatgcagccccttccctaactaacatttccatgatgtatgctcaatgacaaggcagaggaatgtgttggatgagctcaggacctgcctccctggacactcccatcccaggcctgtatatctgttgaccaggaataagccaagcaagcagcctactgtttgactgaatatggatttggggggtggtagagaaagggccggggtggagggttgggaggctcatttgtcattatagatggggtcagacacactaccaaaacagcagcagagatctacaattgagttcacctaaaactcagtgtggacacaggaaaccctcttttaataactgtccaatgggttttccagcctcagctctacagaaaacttgagataacagtggccagtctgcagttagtttgggttcggacaataggcagagctgggaaatggagccaggggcgaaagcccaggtccactttaggatcaggacgggagtggctggtggggaagtgaggtgggtgtggggaggcaatagggagctgggtcatttggtatgggagagtcctctggtggctagtcccagaagtgcatgctttacgaacatatgcttctctccctagggccaccttgagtgaaaccctcccatgctggaattgggccctttcagtgacaacacacaacagttttcaatagataataatcccaagggctttactagcacatgaaacacagggaaaacgtgtaaagttcacaagaaagtcgttccagtgtatcaaatctatcctgtttgccaggtggatataccagggtctcctccacctgtgcatggctggtggtgggtccagtggctgttggataactgatgtattgatggatcattcgccttctgaaagtgccaaactgattagttattttgtgtgtctttttgtgtaactagggtttgaccttccagggcagactgtgctggggcggctgaccccttggggagccaagttattgctcttaccaccaccacttgcccttgtcagtcctccaccctcttgggtttcagtgtcagcatgtagctgtctactcagatcccatccacatcatcaagtctgcagttttttccttgcaaggccttacagggaagatctttgacatagaggatataattttattgacacattttacttgcagagcattcacccgggctaaccagaaagccagcactctgctataaacaaaaaataatgcttcagggctaacatggaatgtgttaaaagattccagcccattaaatgtccaggggaggttttcctgttttcctttccctccatctgggctttgttctcaacacattcattcaacaaacatttattctgcctctaccaggtacagagcactctactattctgcttctctccttttgctttagtttcatgatcatcctgaaccgctgtttccctatcttcatggtgctggcatggatctactctgtctccatgactgtgaagagcatcgtcttggagaaggagttgcgactgaaggagaccttgaaaaatcagggtgtctccaatgcagtgatttggtgtacctggttcctggacagcttctccatcatgtcgatgagcatcttcctcctgacgatattcatcatggtaagccaaatggagaaggcccagaaaatcttgaatactttggttcctttcccctttcctcctgttcatgtgcctggattagtcatgtggccaccaaggagagcgtgacatctagcttcccagcccttccttttagccaacgtgggagacactcaaagagacgaaatctcctgaaggagccactgtatcacagcatcctcccatctcccacttcctgcccaggggtccatggtccacacagacttcccagtcccattccgtgaccatctggagaagctgctattagcagagccctgcacagggtgatagtgtaattaaagtggtcttctctttccaaacacagaaaaaatcagttcagggagtgttttcctgggcttacaattttaactactggctagagttgaaatggggaaagccttttgccttttcagtagcagtaggggaggagatctggattatttacttatcatcatcatggtcacctcctacatggcttcaccaaaaaacattctgctgcctgaaaaagctccaacacctctctctcttttaaaggatggaatttggagtccatccttcctcagtgataaggagtttttatagccacaggcagcatctattggtctgtcctctgcaaacttgcaactcctctgagagctagacttggaaatgaaacattattttgcaatgcgctgctatccttcatttttagctcctccaccgtagatgatagtttgtacttgttaaatgataaggatataaatttaggtcattttttatattttattgggtggaatttggtataatttttagacttcaggctttacaggctcctgagatggactgattgagcttgttctacttcttccccatcatgataggaagtgctgtaccacactaggcagtgtgtgtagtgaccacagactggctgagtgtctcccatcccatgctggcccatatctggtacccacctgatccacaaatgttccatcagatcctgttcaaacaacacatctccagttaagccaaatcttgccctttctccttacggtaaaatgtactaaatctgaaggttttgtctttttaatgttgctccatgatccagtgatctgtggccttggttatgctctgtgctagagtcctaacaagacaaatgctaaggtagaggtcattctgctcaaacaacctgaccccacctggatgtgggcttacatttgcaaagggcaccaaagttctaagagatgaggggaggagctgagccccttgtccttatctaggtttcccttgttctttcccatccctcagtctgcttcttttcccagtaccaacatgtttgtgtcctcagaattaaaggagtaaaaatgtgtaaacatctgactagcaacagccatgagattttgcctggcttgttgataagcagcattgagatctgccctcctaagaatgggccattaggtcttcaaagcttttacgatgtgaggtaaagaatgttcaccaggagtttcatgcacaaaagggtttctctttgtgggaactagaacattgttccagtgatgacggaaacagggctttccataccaaaacagggttttcctttgaatgactctcccacctttcccttgtctcttcctccccacctcaacaacacaggaaagaagctggaagcagggacaatgggaaggtccctttgttactcgagctattagaaacaaaaagaaaagtggccatctgaggaagccacagctggtgaaactgtagggtcacagagtgaattacacctctggcttaagtcagtgaaaagtcctagaagtttgtggtcctagaagtcctaaaagtttatgggactttgttttgagcaaggataagaaattgatttcaggctgggcgtggtggctcacgcctgtaaccctaatactttgggagacagaggcaggtggatcacttcaggtcaggagttccagagcagtctggccaacatggcgaaaccctgcctctcctaaaaatacaaaaattagccaggtgcggtggcacatgcctgtagtcccggctactcaggagactgagcaaggagaatcccttgaacccaggaggtggaggtctcagtgagctgatatcatatcactgcactctagcctgggcaacagagcaagactctgtctaaaaaaataaataaataaaaaagaaattgatttcattcttctgagaactgcaacaactaccttaaagtgattccatccaaaacccacatgttcagccatggacttgcttttatggagctgcgtgtgggtgacacacaaaatcaggagctctgagtcctaatttagacttttatttagatttcctcaaatttgggttccagttaagcgtgggtctcttctgtgccccgctcccctttgccatttgttttatctgttcttcagtctgttctgtcagtacccacaggcaggagagcagaaaggagaaatggcagccacagcagacaaatggcacattcgttccactcagctctcgcatgcccatcacagatacagctcattggtctcttttctatgagaggaagccagagctccagggaactactgccaactgatcagaactcatttaggacatggacctatttgttcctttatgttcctgggaagagcacaggatgaattctatgtactcatttacgtgttcagagagtaaagtgcctcataggatgcctccagcaaaagataaccaagaaggtctaatacctttgacaatctcagtttatcctatagtgtaattggatagcagttcccctagcaaaagttgctagtttggtcctattttctacatagccaaagtgattgattcattggttaatgtgaaagttactgagtactgccagcaggttctaggaaatatatttgtgtgatattcatggatggggaggatcaatccacttccaagtgatttggattaattactggtattttcacctgtgtgggtagcaaacctcagaaaatcaagtatagatgacggcataggacaggccaggccccaggcaaaatgttgaagctcctctggagttccctcccatctccctcttttgttttccatatacctggtttatccagggccctggagatgctccaagaccccctacccaggtcttcctcccttgtcccagctatatttctccatattaccactcttctcaccgaggatttgcttacttaacacataataaatactattaaaagagaaacttaggcacattaaaatgttagagttgattccagcaaacagtgattcacaggaggctccagatcacaagtggttcagggccccactgaggggtagggaagcaagacaaagaaaaacaaagcaaatatttgattggttcaagtggaaagtccctgattacaggttagtgggcagtttgtgattagttaagtttctctaagttgggttttggtttgctgatgtaggaacacagaatgctggggccgtttcaacctaatggtctcccaattaatttttttaacattactgatgactgttaggagtctaatgtgctactcctcccagggaaaatggcattcctaggattaaaggaactcagcacatggagtgtgcgtagaaatttagacactaactgcaggctggtgggagagagccctttagggcagaatgagaaggcgtccggccaagggcaggagttactgacgcatggcctcttggtttcagcatggaagaatcctacattacagcgacccattcatcctcttcctgttcttgttggctttctccactgccaccatcatgctgtgctttctgctcagcaccttcttctccaaggccagtctggcagcagcctgtagtggtgtcatctatttcaccctctacctgccacacatcctgtgcttcgcctggcaggaccgcatgaccgctgagctgaagaaggctgtggtgaggcccttgggctggcccctgtcctacaacacgtttccttggaagggtccgtagcagtcctggaggcccagcctgccctctgagggggtccactttgcctttgacctaaggttaaaaagttcacgtgaggctaaaatgtacaggggcaaaagtgggagcagtcctcaccccgagcgatgcaacagtgactcctcaccacgcctgcttgattcatctgccctggaaagtcattaaaaaaccagttcaactcatgggtccctttatttactcacaagagagagccagcagcccatttcactagttttcctttcctactctttgagaagaatcagaagggagggagcttgccactttactatctgtctaaagagatgtttccattaattaaaggtttttgttttgcttcaaaaaaacttgaattggagtatttccacaagtatctttaacatgctctaccaatgtttgcagaaagaagtgcagaaatgagactgtccacagagtcaggctcgctggccaggagaggactcccgaagctgacttctgatggcctgagaaacttcctagttcacaattcccagacccagacaaagagcactgtcttttctctaattgttttcaaatgggccatttccaccctctaatcagcctctggccctggagggtgcagttccccttgtcctccggagtctccctgtctctgtgctgtagagtcaagaagggacaaccacctgccctcactgggaaaagacagaaagtctgacttgttctcacgactcacacttattaggctccagaggtgtcagggcatctgcctttcatttcttaggttaaataagaaatcaattgctgccatttgtagtacccaattttctaaaatgatcacaatggataagtggcaagaaatccttatgactcatctgtgggcagagttgggctattttggtaatccttgagtaggcagatggaatttgaggccatcttcttgggtacatagatcactaggaagctataggtctagcaactgtggattagggctgggctgagaattgtttcatgttttttgtgactgtatagctagagactctcttgtttgcagagagacactctgaactccccctggccgtcaagggaaagactgccttcaccctcctgagctgaccttacactgagagacaatggggaccctcttttggccctcccctctacctcgagggcatctgggtgctgttgcattggataaaaggcactgctctttttctgtgccctctccgcctcactgcagagcttactgtctccggtggcatttggatttggcactgagtacctggttcgctttgaagagcaaggcctggggctgcagtggagcaacatcgggaacagtcccacggaaggggacgaattcagcttcctgctgtccatgcagatgatgctccttgatgctgctgtctatggcttactcgcttggtaccttgatcaggtgtttccaggtaagcatcctcctctatagggtaaaggtaattgagttcttcagatccccagccctctccattcatctagtttaaatttcatttcttccaagctctttgtcagaaccagcatttgaagtttaaatctagaagttaaaaatccaccagcaaatcctactggctctacttgagaaacaaatccagaatctgatctcttgtcaccacctccaccacaaccttcccaatgccagtctcttccttccactaccacctcccatcagtccattctgcacactgtattcagggagatcctttcagaatcaaggtcatgtggtgtcagccctctctgtcaaatgcttgcactggcttttcctctctttcagagtaaaacccagtgtctcaaccctggcctccaagctgcttcattatccggcctccaactctcttcttcatcttacgattttccctactcctccatgttcctctgctccagccacgtcggcctccttactgactgtttaatacaccgagcgcatttcctcttcagggcctttccacctgctgttctcatgccagaagcacatttctctccccacaacctgcaacccgcccctcatatctgcaggcttgcttccttactttgttaaggtctctgttcaaatgtcccattatcacagggatctttccagactgaagagatctacataactatggctctgtaaacaacattcctccagggttcctgtccccttaccctactttattttggggaacattcttcaccatctgatacaatgatgtatcttatgcatgtatttactgactctctgcccttagtagaatatgagcccagagagcatgcatgtggtctattttgttaactgtgacagtcccagtgcccagaatagtgcctgacctttggtgggcactgaataaatatctaagtaatctgtagcatggaaaatcagcttctgaaaattggctgtttgcacggtcgtgtatttgcttggtagaaaatcaaattttccttcaaattagcattttctggtaactagagctgccccatcttcctctgagtggtctccaagtcagccaatagccttgtgctgtggcagccatgcctggctcttgatgctgtagccaaaagcaggcaggggatggtgaggctggtccagtccatggggagggacaaactcacagctctcagatcatctcagggcagcctttgttggcagaaataggtaggcagccaccctgaataggaggaaggcttctagactgggtcaggaggcctgggtttgcatcctagtggcaagcgtgcattcatttactagggctgccataacaaaataccactaactgggcagcttagacaacagccatttatatctcacagctctgaaggctggaagtccaaaatcaaggtgttggcagggccatgctccctctgaaacctgtaggtgcttgggcactccttgacttgtagatgcttcctgctgatccttcgtctgcacatggcattctgcctgtcttacatggccatcttataaggataccaactggattggattaggtgcctaccttgctcccatgtgacctcatctcaactaatcacatctgcaatgaccctgttcctaaacaaggccacattatgaggtacctggggttagcactctggtatcttttttcttgacagcacttctgacaccaaatgtgtgttttggttttttgttgttgttgttttggcaccaaccaattctcctatattaatgggttgtccaagaattcaattgaattctgacactatccagaattcacacagactccacgggttcagtcccacaaggcttccccgtcttcagatgccagctggaaatgtggtgcccaggctacccacacttttgccaaaatcctgtacttacaatcacagctttaaaatgaaggatgcagctcaggaactgccacatggaagagaagcacagtatggggtcgggggaagagtttctatgctctctctagacgcaccactctcccagcacctcaaagtgttcagcaacccaaaagctctccaaatcttgttgttcgagagtttttataaccctatctccagctccatactcccccattggaggttgagggttgggactgaaagttccattcttcacatgtgtggtgtttctggtgaccagtccccagaaactgcagctatcttggggctctaccctgagtcacatcattagcataaactcagatgtggtagaggaaggggcttattatgaataaaaaaagacactcctttctgccaggaaattccaagggttttaggagatctgtgccctgcacaggagctggggacaaagaccaagtatattttgtgttatgccacagaccccaacatgtctttttggagggagaccaaattcaacccatgacagtgactttgaacaagacatttgaacttagtctgttttttctatcctactagattgttggaaacagatataatagatgaaaattagttgattaaaattgaaatttgtgcataattcaaaagttttattttagccaagctaaagctttcatttattcaacagctatttactgagcagcacctgtgcatgaggctcagcagggccaggttctgggaacagagcggtggagataaagatccagacctgccccgaggaatagacagtccagtggcagcaaaggccatgaaacatacggcaactcttaaaaaaagccgagaccatgattttacaaaatcaacattttgtagggagcagaactttcaaagagaactggactagaaatttgggagtctttttcttggaaccctggtagatccagtagaatgagggatgggggtgtagggttaaaaacactgacattagaactggattacctgtgttggaattcctacatttctgtttcactatctgtgacggggggcagatggctgaatctcagtgtgcctctgtttcctttctcacaagaataatattactacctatctcctggggttgttttgaggtttagattatttaacacatggaaagcactcacagcaatgcctgccacagaaagaatatccagtacatcttagtgatgatcaccattattattatctgactcctggaaaaggacttgatttaattctctcatgaaacgttttcttggaaaactgatgtcaaccaagattattggtcttgctgttgcttataacaccccaaaaacatgactgtgtggataaaaatatgttggaaggggtagtctttctgggagcctgagaatagccatgtaataataactgcaaatatctatagttacaatttgaggttcaggtaaataaactctagatcttatagaactgcggtaaggtaggatagggagactccttcgactttctctgtttatttgtctctatttttaggagactatggaaccccacttccttggtactttcttctacaagagtcgtattggcttggcggtgaaggtgagtcctttaaaacacaaatcttaatgtttgaaatcaactccttgggctctgtgcaagatgtatatggatcacagaggtggccctctatgtaaacggtgtgattcctgatgagtcagctgcctcctggggctctgccccttgatgggcattgcagcgtctgggggaccacctttcacaagttgctgggccctgtgtgatcatgaatggctgatcatggatgaagccctgggtcctgtacaccttgtccagtagactaaattgccctatttaaaaaaggccaagccacttcagggttcaaagaacttttgcagcttttcagtataaagcagaaatccagggaatcatgaaggaacctttgcattcatctcccattgccttccttgtgcctttttattcttctctgccttttcaaaatataaattagtttattctcccaagatgaagactcctcctggggctgaggcagagctgttatcttcagggcaatacctcagattctcctggtgttgatctttcttaggggtggggaaaaaggctgaaagggcatttgcccacaacacatcttaggtaaaaggcacctttactactgaaccaaacaggaggcctagctagagaaagttctagaagcagggaaaagcacagactcttttgtgaggtctgagaaagcaaagaaattccagggtgaaagcgggggactcccctagagctgaagtactctcccatctgtttgttgctcacctacctattctttactttgtattattgggcctgggccaggacttatcctgcaagcactgagatggatgtttgttttctctgggggattagtctttttttttctttttttcttttgttttttgcttttgttttcactgggtcaaacaaacaacactttaacagctcaggattttttcattgtattgacttgtctacctgtaaacttgttaattttttactataataaaattatcatataataaatgaaaaatttcaacacagggcttgtgggcattttatttttctctacaatcccaacagatactctgcctcttaagaaaaaaagaaatcataaggaaaatatgctccttcaaaagtgaatcacaaatatgtttgccaacggaaggcaaatatttttcacctgtctcataggctggactgaaatggatttctaaaactctctaaaaccagaaaagagctgagtgtctccacccaacctccctcctttcacagattaaaaaataaaaaatggagcccaggagacatccagtatcttcccctattggtcacctgggacaaaatctggaacatgcacatgcattgcctggcaggaactcattccagtgattaaactcttcaggaggatgtttcctcttgctatttcattacctatttgtgcagtttgatagctagtaaagtgatcaaaggaactgtggggcatagattcaaaagtccttcaggaagcagaaatagaagaacagtactagaggcagcaggtccctgaccagcaggcccactacctgctgctccagcacacatcctgcacattttcagagggtgggggacagaggggccctgggtggctgttgcattgagaaatctcgccctgctcctgtatgtgcacttgaggccgagagcccttggatgcctggtgacagtggtttcctcctgcccctgccttcctctctggcagactgactggcccttctgctcctcttccccttccaggatgtcctgatatctttttaaaccaaatgccaagtttgccaaaaagtgtctgtttgtgtgtgtgtgtgtgtgtgtgttcaatgcgtgtgtttataccacacttcacaatttgtccaggcttgtattaataccatcaccaggctcaaccctggtgttaattccaagatacttaaatgcccatctaggtgaatttctcaggtaaaccatatattcaagctgtagtttaagctggctgcccgtcatagcactttgaatagactttgtttttgtttttgttttttgagacagagtctcactctgtcggccaggctggagtgcagtggcactatctcggctcactgcaacctccgcctcccgggttcaagcgattctcctgcctcagcctcctaagtagctgggattacaggtgagcgccaccccacccggctaatttttgtatttttagtagatacggggtttcaccatgttggtcagactggtctcgaactcctgacctcatgatacgcctacattggcctcccaaagtgctgggattacaggcgtgagccaccacatccggcccctgaatagacttttactcaaggttcaccatgactttcacatgttttgtattggagtaaaatgtgccagtggtgggctaaagaaaattaactcatttcaaattcaaacctggttttcttaatttttttaaaatcacagtttctgaaactgtgggctcctcatggcacattgagaggaggaggtgaaactctccaagtctgaagctcctgttataaatcttcctctggcaaagattgtgtgatcaggcttgagtacctcacagtcctagagcaggtcaaaggctggctaggaaactcatttgctccctgtacctctcccctcctttcctgcctttgctcgttctcagctcccggtggtagagtaacactggcttctgattggtgcagggtgttcaaccagagaagaaagagccctggaaaagaccgagcccctaacagaggaaacggaggatccagagcacccagaaggaatacacggtaaaaccccgataaagaatacacagcagaggcgaggaaaaggctctaagcactgcagagggccagagcaaaacatctcatggcaagggtggaaagaagcctaggaaactgactctctctgtggacaagtgttaaaccagatcccttctcagaggtccatctgcatgtgtgtggaatgaatggttcagcccagacattagcgcatatttcctggagaaagcaaataccaactatgtagtgtgcctgtgcccttgttaggcaaatcccaagtgagttgcacaaatgtgctgacttccgaggatttagcaagaacaataactttggtcactgggacttaaagcggatatgagctataaggaaagacaaaaataaatgcttctgtgtccagggggaaagagactccaggggagctgactacacttcacttacggcttacaaatctagaaggccattcattgaaaccatcagaagcctttcctgacagtggaagttacctaataatccctaaactgacgacccagatttacaagttttgttttcctggcttttgctgccctcatcttctctcttaaactagttctgtatttctcccaaggcttttcattccctaagcatacgcatttctctgtggccaaaatgctctgggtttagacaggcagcacagcccctgggctctgcctgacagggcaggagagggtctggcctttatccctccagcccaccccaggggccatttcataaaactaaagccagagacctgcagcccctcccagagttagactgcagtacaccatgcctctggcaagatcctcctcccacagtggaaagtctaagccaaatcaggaggctggggactggttccacctcagttgcaggcaaggccaggaggcacggatagaagaaacagtggactttttccccctagggaaagaaatgcttagagctacagtattaagatgacaaattaagctgtgccatatagggtgaaatgaagcagggatagatgggaggtcagggagaagtgagagcactcggtgagggtctgcactggagggggcatgggaggaagaaggaggggagtggggtttgagggatggtgatgaggaagcgtggactgccctacccacctattggaaaacctgggagttctgaggagcaagaagccttagtcaaagtcaactcaaagattcaagccaaggtgactaagagaatggcggtccagaaaaggtcatgggagaatctgaaggcagatgttgttttgggaagatgaagaacctaagccgcttccagaaattcatgaggaaatgccccgtggactgttggcaatgagggcctaggaccaaggttgagcttggggccaactctccctatagacagtgagtgcattctgacaagcatgggctctgggttcaaatcccaactctgccactcatgcctatgtgtccttaataggacgcttgatgtctctgtgtctaaggtttcctggactatggaaatgagcctaataaatgtctaccccttaggaccattgtaagagtacattgaggtaatttgtgtaaagcagtcgaagcagtgcctggcatataggaggtgctgtataaacgtttgatgctagtattactattattattctggagtcttccttgcaacggtgatagccgaagccacaggggcaggtgacgttataggcagaatacaagggcctggagacagagccctggggccatgtaattaggcattatgtttacatcatgttcattttttttcctccaagactccttctttgaacgtgagcatccagggtgggttcctggggtatgcgtgaagaatctggtaaagatttttgagccctgtggccggccagctgtggaccgtctgaacatcaccttctacgagaaccagatcaccgcattcctgggccacaatggagctgggaaaaccaccaccttgtgagtcttccagcagagaagctggctgccatgctagcctgtcatttcctggcttagtctttccctatcagcggctgtctactctttcccacaaattttagtgacaaatatttgcggccccaaaaatgtgtaaaagctttctgcagtattcaaagatcactaatatgtattctcttgatggggaggtagaatacgtttattgccccttttgtgtgccggggaagtggacattcattcagagagttgaagtgactttcctgaagccaccaagttgtcatggctcagcgggggcaaaagccaggcaccacagttgcctcttgtttctcacaccttgagtctttccccccatctcaacagtccatggtggtgatcaagtcatggccactgtcatcatgtgcatggaagctatagagtcctcctatttcctttctcttttcttttctttttttttttttttttttttgagatagtaaccattacccatgctggagggcagtggtgcgatcttggctcactgcaacctccgcctcccaggatcaagcgattctcccacctcagcctcccaagtaggtgggactacaggtgcataccaccatgcccagctaatttttgtattttttttttttttttttttttttagtacagacagggtttcaccatgttggccaggctggtctcgaactcctgacctcaggtgatctgcccgcctcagcttcccaaagtgctgggattacaggcgtgagcgaccgcaccaggccgagtcctgctattttcaaggaacattccttttcctaccaatcattaggcaggcttcaacatcagctgatgagggttagtggtcgttctggagaaagtgaaaaaagaatcagtctctagaggggcttgtggagtaaccgcctggtaacagaaggtcagggcagggaaggcaaaggggctctgcgcggatctctcagctccgcaggcgccccactctcctccaagggacccgagcgccatctgctgagaggagaacacggcccgccatggtttcccaaggagcagcagacacggacctcgcagggggcagcgaacccacgtgacacagtcttcaagtcctttggagagccccaggaaggaacaacagcgtgtacaccctgtgatggaatgttctctagggcggttcagtgtgaatggaatgtggggccggtgccattctaattggttctgtttccctctagtggttgatcgcggagatttcggcttctccatcaggacaagttcagatagcctgagatggtatcagaactcagggacagagctgggtgtggcggccctgcatccatctgctttctctccatgctaactgatatggtcagagagctggaagcaaattccaggaccccagggctccgcaaaggcaaacacattacttcatcggctgctgacatgcaacttcccccaggggttaaaacaatgtttaatactaacagtaataatatttttgagttttactttatgctggcgctgttctaatgttgtaagtgtattaactcatttaagccttacaacaacctaaggacatgggagtcatagttcccatttaaaaaaaaaaaaaaaaaaagcccaccattgctctgaggctttttatgttttggatccaaagctaatattggtggtggtaattcccatgcctggcttcgatcaattaatcagcaaatgcctaggactgcttagggttctggccttcatcaagaccttacccgggctttatgatgatgacacctggcttttcaatagccatgactgctcacccaggaggcaacgcctcgagtcatgcaccgaacaccttttattgatcctctccaacaccaggctccgtgatggctgagctggggacacctgtgactgcacgtgaacattttgaggctgggaatcccaaaggccctcggcgttggcctgggagcaccatgaaacaagtagaagcagagaaggatggcagaggtggccctctgcattagggcctggatgtatacactggtgctaagggggccccacagctaataggggtttgagtttgactgacagccccaggcaggaatctgtgagagttctcactgaacctggtgtgggggtggccctcctaaggcatgttgctaaaggccatctcttctgccactgacgcctgtgttctgcaggtccatcctgacgggtctgttgccaccaacctctgggactgtgctcgttgggggaagggacattgaaaccagcctggatgcagtccggcagagccttggcatgtgtccacagcacaacatcctgttccaccagtaagcgacacaggaactgagaccgccccatcccctctcctcacctctgcccccagcacacttctctagagcccagctcaggggtgccaggcctgggcacaggcagagatacagactcttatttggtttcccctatgtttaaagtcctttgtcctacttgcagtgagaattgtccctgagaatatgggactctgcctctgctgctcagagctgagggctcctccctcagaagggtgaggctgccttcgctctgacagagcagctgatcgatccccgagccccttgtgcagccctgaagtacttcctctctgggaccaaagacaggagaaccattgttcctttttcctgttgaagccacggcctgaaaggcaaacttttcagggggcttttcagttactttttttccccaataagatatcttttatttcttatctaagaagctacgcatagtcattgtgaaagaaaaaaaaggaagggaggaaggaagggaggaaggaaggaaggaaggaaggaaggaaagaagggagggagggaggggagaaggaagcgagggagggagggaggggagaaggaagggaacaggagggaggaaaagggaaggggaaggaggaaggaaagggaaggagggaggaagtaaatataggtaaacaaaaaattgaaaataaaagtcacctgtaatttcactactcagagataaccgctgagttataacattggtatataattttttagaactttctcctatacatgtatagatagataaacacatatacttcaaaatgataaagaatagtaaaactatgcatacaattttataacctgacttttttttcaaaaaaaaggattgcttttttaaacataagatatcaggaacatctttcatgtcattacatattcttctataaaataatatttaatgtttacagattattccattgtatgcatgaactatgtaagccatcctcttattagatatttaagcagggtctgctatttttgtattgtatcataaacaccaccacagtgagcatcttgattgccaaatcaagaatacttgtcctcaattatttctgtaagatcagctgctggaagtggaagtgctaagccactgcttttctcgttgtcccatcctcctagcctcacggtggctgagcacatgctgttctatgcccagctgaaaggaaagtcccaggaggaggcccagctggagatggaagccatgttggaggacacaggcctccaccacaagcggaatgaagaggctcaggacctatcaggtgctcagagctggatggagacagggccacagatggcaaatccatggctccccagtgcacccaggaggcaggggaggcttggagcaggagagcttctaagggtgggaacacctctgtgaagttacaccaaaaatctaagagcagcccccagatcattttccctgcagagcactgtctcacagcagcctgggttttatttgtcctgagattgatgtgcttgaacagtcttcaaagggtctgatccgaggaggtgagggttgccctttctgcatttacaaagcctgaacagtattagggctttgaacgctataaacatctaagaggcagcaccaaaccactgctgggttaaggtacccccacaatgccacttgccctgggcctttctcttcctcaccctccacagccccttaactctcccgtccttcttgtgcctccaggtggcatgcagagaaagctgtcggttgccattgcctttgtgggagatgccaaggtggtgattctggacgaacccacctctggggtggacccttactcgagacgctcaatctgggatctgctcctgaagtatcgctcaggtaacagctgctgctcagtctcctgggctgggctctcactgcagccctagctgtggtccccactctctcacctgccattttgtagctgagtacaggaaccacaatgactacactcagaagggggtttatcagtgacttggtgaatctaagttccagctaaagcctcctgaggtttttacaaatataaacagagaatcactgatgatgcaacctacttcccaaaatattttagaaaattctcttgacctgcagcccttctgtctggaataatggatgctactctaggtgaatgtcttctctgaccatggggacccaggtcacctgcaaacatacctagaagctccatagctgtcagatgaccactcaggaccagtgtgagggtgacctgctgggcattcagtgctccagagggtggccacagatggaagtggctcctctgtcatggcacctctcagacaaggggctcagatcagaagagacagcaagcagagctgagtgcccatagaggtaacagcacggttcaaccccgtggtcaagccagagctttcccccttgctctactcacacagcgttgccccgtgcctttctctgagggtttgtcatcctgaaatcctcattgctattttctttctttcttttcttttttttttttttttttttttgagacagaatctcgctctgtcgcgcaggctggagtgcagtggcgcaatctccactcactgcaagctccgcctcctgggttcgagccattctcctgcctcagcctcctgagtagctgggactacaggtgcccgccaccacgcctagctaattgtttttgtatttttagtagagacggggtttcaccgtgttagccaggatggtctcgatctcccgacctcaggtgatcctcccgccttgtcctcccaaagtgctgggattacaggcatgagccaccgtgcccggcctgctgttttctgttaatgacatctccagttagtgagagtatgcacgtgtgtgttctttatgaagagtataaatccagagcttaatgatccagaaaatgtacatatgaaactccctagatgctgaccataatacatgagcccctaatatagagatttatttgaatcagatcctatgctggatacagagacactgtgtgtggcaatgctttacagtatgtaggaagctatgaaatgttagttattattgtcctaatatgctggaatttgctgctgaattagttcccttgggtttttttttttagttaactcctgatttttgcaactatatagccaggaaattgctgtacaccctttaccaacaatgcccaacccagggcaggcctggtgattgccctggcccctaccttgcaggcagaaccatcatcatgtccactcaccacatggacgaggccgacctccttggggaccgcattgccatcattgcccagggaaggctctactgctcaggcaccccactcttcctgaagaactgctttggcacaggcttgtacttaaccttggtgcgcaagatgaaaaacatccagagccaaaggaaaggcagtgaggtaggtgtctgcccagggaaggaccctggcctgggtgagaaggagcacacagcacggggctgccactccagacatggctactcacacaggctctcgccaccagaatcagtgtctttgttctgggaccatttgcagaagatttcgatgaacacattctgaagcctcctcctacagagatgctttagccaaaatgaaacaactagctttaaatggtctgcaagtattacatgccagattacacaccagtttggtgcggtttggtgcaacatagaagtgagtgtcttattctgtaaggttaggctgttttaagagcaattggttgagcttcatttcaacattaatattccctaattaaacctgaatttcagtggtaagtgaaaactaagaagaggcctccttgggtgctataacataaaaatgatgaaggcaaaaagtaccaaccagcagagaccacttcagcacatcaggagacccagttttatgtctgtgctgcgaagtgaacaaactgtgtcatcctaggcaaattatttaattcctccttttttttagtatttttttcttcttcacatggaacatgaagctaatgacctctgcttctatttcttagggatgtgaagataagtgagataaagtattataaatgtgctctgggcttcttaagaacaggcattgctcacattcaaatggtcatgattatgatatggcagcattatttatgcctctggtttaagtgtctggctgccgctggggtttcctatgtccatccacggggagggaggcacagaatgtctcccacaggcagaacctacagctgccacataattgatgacaagccaaagggacccttggaggttctgctcctctctgtgtgtgactcacacactctctaggataaaatcaagcgactacaccctcaaaatgctcagatgaattaacagattaaacagtgaagaaaaaaatgtgttgactacacttggcagtgagaaataaataaagcgggcggtgacagcagctggcatcagggagaggctgtcatggaagggatgtgcatcttgtcagtcatcccatccatctgttgcaggggacctgcagctgctcgtctaagggtttctccaccacgtgtccagcccacgtcgatgacctaactccagaacaagtcctggatggtaaggactggacgggccatacttgggttccgtctggcagccatctcccagtattgctgggtgtgtcctgttgtgatgcattttaatgggagcaaagagaacactgggtacttctgcaggtcacacagttgttcttttgctttgagcttctttctcctcttccttcttccttcattcccaaagggattttaaaagtcatgcacctaaaggccctctccctttaatgaggaatacactctgtgctcttacccttagtaagccatcattcctggggtccccctgccctggctccaggccacattccttagtgtctggggagagcttcttctacatgtgtgccgtggcgccctctagtggaagcatggtgatgcacggctcttccagtgaattcgtggagtcagagattgcacatgtggatggcaagtctggaaatagcatacacccctgttatactcctgattctcccctcagcttcccaatttcccagtgattctccctttaattaggatgcactgaagctctcaggggtgcccccatctccaaggagctgcagtggagaggctatcccctctctatgtgagagaatgtgtgagaagcgtattcccacacaggagcaaaactaaacttacgtactgatgcaggttaatgaatggggaaagtatctgcttatcaaagaaaaggcatatttttctatttagcacaaactttttcaaatgttaagaatttactaactgaaatctggtgaagcaagagaaccgggcaatatttgcgttgtctgatcattacaactggagggaacatgctcagagaggcatcatcactgttcatgcacctgccctctctttacactgagagaccctgtgatgaacagaaaacatctttttaggatgacatctctgggtctttctcctagcctgccttgctgtgggtacctatctccctgctctctgaaccttggtcaagaagtttatatttgttttaaattgatactaatatgttaagttactgtgatttgccaaaatcagattggaaacagggcctgcatggctgaatgattcttttttttaaattactttatttctaaataaaggttttctttgtatagaatcgggatgctgtgaatggtgggaaatgcactaaatagttatgccccaaataagaaagggaaaatcatttgaatccccagttagctccttgaaagtcttttcacttaaacacacccacataccacacacacactcacagacctccctcccagatgcccaaagccctgctgacctacagagctacttctggaaaggctgacacatgcctaagacacaattcctgggaatccagcagctttgggttcaatttccttcctaaaagaacaatgaatatgacccctggagagctattagggcagagctgcttccttaacgtaaaggactctccagcctccgtatgaagtcatctcagagctaaagacaatcaagtccaacttgcagatttgacataaagcaagacttccaatccggctaggcagaaggattttggttgaaaaccatgaaatcccttcatatggatcattttttaaacaacaaaaaaagaaaagaacctactgggtgtccacaactctgagagctgctttctgaagagtcatgttttgagtcctggaatccctctccctttgacctgcctctcaagacaatgtgcgagagaactctctcttcaagtgcatgcaagtgaggttttcacagttagatttttaattttaaagtaatacacatttgtacataaaattcaattctgactgtatacatgtgtcagataaacagttgatacctgacacttgttcacagtctatgatacgcaccgcatatcctaccctctcccccagcctctctccatggcttctcaaccccccctctgcatttcctgtgacctgaggattcagttttgtttgtggaggcaggtgcaatcccaagagaaactgtgcaatcttctgagaagttagagtaggcatgtgtgtgtgatttagggaaggtacttctcactcagcttggtcaccggttccaggtttgtgtcttgggcaagtcccccatagctggtgacagaccagaaaaatgaaaacaactttgacttagccctcaagttttcagtgaatgagaatgaaaaacaaccatgagtaagagatttcttaccgagatgatgtaaaggataataatagcagccagcactcacctatgtgccaggtatttctctaactgctttgtgtagtttgactcatccagtcctcaaaaacaacaatgaagtggataccagtattttccccttttcacagatgaggaaagtctaatgtgacccacccaacataacatagtttgaggggacagagcatttcgttgaacagaggaggaactggcacaggaaagttgcatgacccccccaccaacctccgcccccaggttgcacagctagctagtcgggaggactttgcttccgtttccctctgcctctcaatgatgatctcagggccaactaagctaaaagcagacttgatggagcatcagtcctctgaaagagtcactgccgagatacaaaatacctcttcttcaaaggggaagtggagagaagtaggaaatctgggtaacctcacagtcttccagtttctggaaaacagagctggcatcagtcttttttcttgtcctaggggatgtaaatgagctgatggatgtagttctccaccatgttccagaggcaaagctggtggagtgcattggtcaagaacttatcttccttcttccaaataagaacttcaagcacagagcatatgccagccttttcagagagctggaggagacgctggctgaccttggtctcagcagttttggaatttctgacactcccctggaagaggtaaagtagagattccagctggtttctgtcaagtgccagaagtggcggttctttgaaaaagtctaacattagagcaaagttttgtaaaagcaaaaagccatcgttccccacccaagcatagcaactatctttatttttggcatagttcccccatctctgcatgcatacaaattttatgtacttgtggttactgtgtgcttacgtttttgtatttatagaagatgatgttctcagatagagtcgtaatggattttcttcccattatgaagcaatacccaacaaaacagagcttgggttagatttttctgagaataagaatgactaaacaaaattctctctttttttcttcttgacagatttttctgaaggtcacggaggattctgattcaggacctctgtttgcgggtatggtgctggagccagtggcttgttcccttccttgcctccctcccaagttccatctcgaaagtctaaggggctgggcacagtggctcatgcctgtaatcccagcaatttgggaggccaaggcagatggaccacctgagttcgagaccagcctggccaacatggtgaaaccccatctgtactaaaaatacaaaaattagctaggtgtggtggcgcgcacctgtaattccagctactcgggaggctgaggcaggagaatcacttgaacctgggaggcagaggttgcagtgagcagagattgtgccactgcactgcagcctgagcgacaagagcaaaatccatctcaaaaaaaaaaaaaagtctaaggaaaaagtcatgaaacaacaaagcaggcaaatactcctccatagtatctgactccccagtagtaggcattttgcatcctagatggctttgagtgacaaaggaataacagactgagttaggtctagatggggacactttggatgaatgaggattcttacggaggtcaggttggtagcttcatccctcagctcctcatgctgtatccccagtctctcggcctgccatgtcatcatcctcatctcctcctgtcatctccaccaggcctctgatccatctctgtctgcatgagtgacagctggcagagtccttaatgtttatcaaatacaactcagacgtcagtctcctggcccctttgagatcaacataaaatcattttgaacccttatttagtggtctatgggctttgaaaacatggggaccaaaattcctgtggattctagaagtctctcttctacatgtgtcagcctgggcaccaactagctccttccatgaacttttatcaaacccacagccacacaaagcatgtgtgagtgtagcagagtttacagcagagggtggagggtggggagatagatgtgtggaagggttacctgccacacaaacagaaaccacttctgatagaacacgaggtgtccacccacactgtaaaatcctctcctggtacaggcaaagctttgcagcgattctcctttgctgcccctgggctcctaacacctcctaaaccaccagttacctccttctttccagtgtggcatatttcagtgttttcctgttggagtgtttcctttctatgtggattctggaatcagctcttaagataacttggttttcatctttcttcataatgatcccaaacatctatctactatgcctagaactaccaatggacacatataccagcccagatatgcttcagcccatcccagtacatcgcatggtgaccaaaagatgtagtcgtcctggcacagtgggtgtggggcaggaagcagtcctctccaggggacagcagcaattcaccacagaacccaagtttctttcaagctctgctgacacagaaattgaataatctcagctcacccaatgtcaaagactcatattaaccaagaccagaatgaaaatatgctaatttatatcagaagctttgctggattcaagagttagggccttttacctgtgcagaatattccttcttgataaataggccctctcaggagaataaattacacatcagaggactgtttagtcagcataggcatagaacaggatgttccaaagatacagtcaaggggagtgggtaagagtgtagcctctggagtgaggccgaccaaatatcaaacctgagcttcataatttgcaaactaactggctttgggtaagtacatagcctctttgtacctgtttccccatctgcaaaatggagataataatagcatctacctgtagcattgttgagagaattaagtgagttaatgcttgccgacttataacacagtatacgatcactgattaagacttagcaactctaaactaaatgtttacaaaccatctcttacctcaaagcacttaacatccattgtcttatttgattatcactgtaatcttatgaagcaggcagggcaggggtctgccccatctggggggaactgagctcacagaggttggagggtttgcctaaagtcacccaggccactgggtctcactctctggtcttagctctgtaatctaggatgctcaatgccacactctcagccacttttcagatggctaagtacatttgttttgagttagctcagtctcagaggatgacattttctgatcttgtctccagtgtttaaatgaacctgtagctgtgcattggggtcacacaatgcgtggcatggagagggtctgtggctgactgccacggttactacgtgaaaccatcattacagcagttactactgttactgcctgagaacatcattacaagactgaacgaagggatcaacatggaaatgataacaaaaaaaccaaagtaactgttttaaggaaaggctagcatcgggaagaagaagagagaagaagagaagaagaaaagggctccctgcttctaatgagtaaaggcagctccctaagcttctgcagcccttcattatttattgggtaacaggaggaaggagcaggaggtaatgattgggtcagctgcttaaatgatcacgggttcatgttgttactgacagatttcaattatgcctaatcataagaaacatttgtgcagcctccaacaagggtcaatgccacttctgaaggggtgactcatagtcagtaactagaaagcagcagatagctagggacaaactggcgattctgaataggcctggaacccttagctctggccaggtcagtgggctccagtcaggatggagccttcagggagagatcaaagctcagaggtttgagatgatatcagccagcaaagaggaggggcagtagggatcctcccagagggagggccagccatagaagacatcaaatctgagcccggatcaggagaaggagcctgcagaactggggctctggcaccgagaacctgcagaacttcgcccctctgagtgcaggtgccagggctggggctgccacccagccttcgcatcccaggcctggcacgtcataggtaaatgtagttgaaaggatgactgagctgatccaattccctttacaactgtccttgtcctgggggacttgaggagggttaagaaagcagctggggaccaaccaacagtcctctaggctctccatgtccagcaatagttgttcagcaaatgagcattaatcagtgactataaactgtagcttcaacataaccgacaacttgcaatggtttctagagcatgctcccatgtgttatctcatttaaatttccaaaccaatcctgtgaaatgttctttttttttttcttttttttttttttgagatagagttttgctctgtcacccaggctggaatacagcggctcgatcatagctcactgcagccttgacctcctgggcccaaggggtcctcccacctcagcctcccaagtagctgggactacaggcacacgccaccgtgcctggctaatttcttttctagttgtttgtagagacagggtctccctatgttgtacaggctgatctgaaactcctggggtcaatcaatcctcctggcttggcctcccaaagtgctgggattacaggcatgagccaccatgccttcattttacagataagaagtctgagaaaactcagatttaggcagattgagtcacttccccaaatttatgtatcttgtaagaatccatattcaaacctcagtcccctaactcttagttcattactttttctaccacttctcagtatcctctaagaattcagaaagaaccacatcgactctgatttttcatttgtttaagtacacaggtaataggtgaatgtattttgttgtttaaaaattcatataatacacaaaaggctaaagtctcgcttcccacttcctctcccctttctacccaactctgcctccccagggagagcttctgctgacagtcggtggacattctttcagagttttacaattatgtgtgtgtgtgtacataagatgtcagtttttctttgtgtaggatacatgaacatgaattttaaacataaatgtgagtgtattacacatattgaccagcaccttagtttttttgtttgtttgtttggttttctttgtgctgtttgagaaggagtcttgctctgtcacccaggctggagtgcagtcttgcaatctcggcttacgcaacctccacctcctgggttcaagtgattctcctgcctcagcctcccgagtagttgggattacaggtgcctgccaccatgcctggctaatttttgtatttttgtagagagggggtttcactatgtaggtcaagctggtctcaaactgctgacctcaaatgatccatccacctcagcctcccaaagtgctgagatgacaggcgtgagcctccgtgcccagccagttttgtttttttattaaccaagttacgtattttaaacttctccatgtcaatgcttttagagctattttgttctctttaatgttaatagagaattttaaggcaatttcaggtgaatctatacaatttctctgtataagtaatttacactagaaatagatttttataaagatgattaagctaccagcctggtatttcattgctgacttaaatgaagaggaaaatcaatgctgtaagggaaaaaaaaaatggcattagagatccagaccttataggcattttccaaattattaattcaatctctcaaaacaggtggcgctcagcagaaaagagaaaacgtcaacccccgacacccctgcttgggtcccagagagaaggctggacagacaccccaggactccaatgtctgctccccaggggcgccggctgctcacccagagggccagcctcccccagagccagagtgcccaggcccgcagctcaacacggggacacagctggtcctccagcatgtgcaggcgctgctggtcaagagattccaacacaccatccgcagccacaaggacttcctggcgcaggtactattgtcggtcggtgtttagctgagctcagtggctcctctcccagccttcccctcctctcctgagtgttccttcaggcatgggttataactcagcaaggagcaccctctttagattctgctggttttgtttcctgctttccaaacccttatcttgattcttggtaacatgaatcttctttgtaagttggacctcccctagcaaagaaaatagaataatagtgaaaatgttaatattgtttttatttttacagtgagggataaagtcatgttttcattcatttttgcagtgaccctacatatcaaaatcattgccctcttttttcttttaatgttgtttaatttagaaaaagaagctctggtttaaagaacagtgagtcacgtgacttgctctttgaaatgccctttgaagtctggctgaacactgggctgcattcagattcttcagtggccaccagaacattctgttttcttctgcacatcttacctttgcacaccctgcttattatgttcccccagaagcccaaccctctccaccaggggctgattaggaggctgcaggataaatgtttaaaagaatgaagatgtgtgtgcacgcgcacgtgtgacatctccatgccacagtcatgtttattccacgtctattctcccacagatcgtgctcccggctacctttgtgtttttggctctgatgctttctattgttatccctccttttggcgaataccccgctttgacccttcacccctggatatatgggcagcagtacaccttcttcaggtgcgcggactcggggtcaccattctcctctgtgggtttggggcacctgggtcacatgctgcttagaagggccctgaccttcccacttcactgggaccttcaccaatgagagaggggaggggtctttgggctgcctgcagaaaggaacttaatgtatctgccactgcttggaaaggcgatcctagtggacaggcaggactgcttgggaaggccgaatggggaaaggaatgcaaagcttaggtgaatgggttgaagcgccatctttttgaggcataggtgacatgccatcagaccactgcgagtgttcaggcagcctaccgcactcccaggagagctagcgccatcccaaggcagcattcggtgcctccaatacatacctggcacacagcagctatccagtaaaggctctgagttgcatgatgttggcacgcgcctgctctgtcccagtcacatgtctcactctgtctagcatggatgaaccaggcagtgagcagttcacggtacttgcagacgtcctcctgaataagccaggctttggcaaccgctgcctgaaggaagggtggcttccgtaagtgcctacgcgcccctgtcctaagaagactagctcccctgggaggacccaacggtgggttcaagatggcaggcgttggggaggccccactcaatcctgctctgctggtcacttccatgtctctgaccagcactcccccaacctctccttccacacttgtgtgcagggacattcactacctcctaggaagcccccacaccactggacagctctatatttctcagcatagaagttctatgttgagttgacagatgattccccataacttatttgaaaggcctctgagcagggagggagggaaatagggttatgctattgtgtgattgggccttgaatggcgtgagtgacacagtggccagtactttgtgatagttgtgagtctggagaagggagttagcgaaggccattgacatccaccaggaatcctaaaagttcaatataattttaacttttctccctcagtctttttcaaagctgtcaataaggaccaaaacagactaatttcaaattcctcttctggttgctgtgtctctcaacagctagagctgctaggaataaaaagggagacaaaacgatccacaagctagagatggttattccccagccccacacctagtcagtcacaaaaccctagttttgatattgcttgagcagaaaccagcctccaagagaataagaagaaagggcctgggtctaaagaggaggaggaaagggttgggcacaatttcttatgcctagggatttgtcagcaactttgaggctgattatggaatattttcttgtcttccatgagggagtacccctgtggcaactcaacaccctggaagactccttctgtgtccccaaacatcacccagctgttccagaagcagaaatggacacaggtcaacccttcaccatcctgcaggtgcagcaccagggagaagctcaccatgctgccagagtgccccgagggtgccgggggcctcccgcccccccaggtacctgacctccaaacaacggggccccaggtctgcctgccacagagggactaggggagtccctggtatctcctgagtctctcacaaactaacatttcaaactggcagttgagtaggggactaaaccaaactccctgcaccctctgggaggggctccccacagggcgctgtggctgccaactggaggaagccactcaccaaaagcttcattttccaccagatacttcctatttgatctagtagaaaaaatgtgtttaagcactaaaaaaaattaagtcatatgtgctcattatagaaaaattagaaaacacaggtaagtcagaaggaaaaaaaatcatcgcttggatataaacacagataatgtttggtttgcagccacccaaacagattatattccaaatattgtcttaaaatctgatttactgcataatttactaggaacatgcatccatgtcaataaatagacatctgcatcacttttaatatctgtatattatcccattgtttgaatttcttttttttttttttttttttttttgagacagagtctctctctgtcacccaggttggagtgcagcggtgtgatctcggctcactgcaacctctgcctcccaggttcaattcttgtgcctcagcccccccgagtagtggggattacaggcatgcaccatcatgcccgcctaatttttttggtagttttagtacagatggggttttaccatgttggccaggctggtgttgaactcctggcctcaagtgatctacccacttctgcctaccagagtgctaggattacaagcgtcagccactgctcctggcctaaagttactttaaattaactgatctcccattattcgccacttaggttttttagttttcaccattataagcaatgctatgatgtacattcaaatggaaatgtgtttacacacttattaacagtcttaattaagaagctctccatgtgctgtgtctctaacatctgcaggtatgtacacaaatacatgcacagccagcatccatcttttgcagggacattaatgatcttggctctgagcagcaccctgtcctgggagttctaaagtccagaacagattacagtgagcatctcctgggggatttagagacatcaaagaaggctgtgtccgtggttgataatgggcctcccagctgacttgccagggctgggccttagacagccctgtccaatgatttgtcaatgaataaactgttcccaaacaggctatgcagttcagtgggaaagcacaggtatgggacacggagagccccaggtggactacttgacctctctgagccttaattttatcacctgtgaattgggaataactgcttatttcataatattattatgaggatttaatgaaatcatgtgggcaaggaattatttagaattagattcaactcaagtgatgacaaccccaaactaacagcagataaaacaagacacaacttgtttctcactcatctaaaagtctacgtgggtggtgcacgatgttctattctctttctcctccacactaaacaggcctcagcctcatcagccaataaggcaggagctgccttccaggcagcggaatggaagaaggatgaagcaaaacagagggcagagtgtgcacatgtgctatgtttagggaaggttttctgaagttcccacatagtacttccacttacaaacccaacaaaaaaggctatggctaaggcagcagggaggagcaaataatgggagcaactagattttgccacagcacctatcacagtctggtttataaatggttctaggccaagaacacccgatccctgctcttttttatattctaaagcatgtatctttatatttctcaagcaatattttctctctttgaatcacagctcatctgctgcatcatagggatcccaaaagaaggacccaaggaacttgtctcagtcctctgtgccccaagaggaagctttgcttgtttgctttgctgtcaatgctgagggctcctgtggctgcctccactcaaaaccctccagcatcaggacgtcaaggctgtgatactgtaccctgagctcttggccagggcgagggaggggaggccaagcctacctacatggtgtttcatttcctaaacgaacccttacttccacgcggtctgtccagcttagaaacttattttcagtagtgttggtccttggtccctggacaaaatgtaacagccaaagtcctagaaaaaggcaagccagttcctgccattttctttcacttctgcatttcctcactattatacgtgccttccattggagcaaaactgaatgccacgcatatgcacaggagctgtgcgcgctctgtctctctcactcactctttttctctctctctctttctctctcaatctctctgtctctatctatctcttactctttatctctcactctctcactctttctcactctttctctcaatctctttctcattctctctctatctttctctctctctctctttctcacacacacacactcacaaacccacactcttattcacatctgctcaccctagccactcaaacacaatccctcattcagcctggaataagtccagagggcgtgggcctgattcagagacaatcagttgttctcatctgggaaatggggcaatgtggtcatctctagggaccctccctgctctaacattctttgaatgtggtgggtcctgaggtggaagcactctgtccctgacttctagtatatgtggagatagggttacacaaatattttattgggcagaacttttataaaacaatttatcataagctatcgcagccagcagcaatttttccaacctggattccaccaggggagcttggccggtgtctgagtgccactttcagcttgagaagcaggtgactcagtgaaaagagcaaggaggagacagaggcagattcagttcctaggccctgggccacccacctgcaagtttgcagcccagtcagtgcaagtcagctaactgttctgaacctcagtttctctgtctgtaaattaagctaaaaattcttctttcaaagagtgtcaggatgaagtgagatcgtgtatgtagggcatttaacatagtgcccgacacacagggagcattcggtaggtgccagctctcctcctggcaggagagagagaaacaaggtgaaaagagtgaattaaagaagaggaaagtcaaatgggaaaacagggggaggagatagaaagtgtatgaaaaggaaagaatggtgcgcaataacggcggtgtaatgccaccaaaatcccctcaactacttctgggcagcacccttgacagagtgaatgcttttatgagaatgtaagcggaatgtgttcccagatttgcagtaatattgccacctggtggacaaacccatgcacctttgaattttccaaaatatttcgatgaactagcttccagtcctagatgtattttgaaagtgatttgtaaattgtaaggaactattcaaattctttcattaatgtcacaaatcaactgtgtcatctgtatgccacccactattctgggtgctggggacacaacagctcacaaatcaggcaaagtccctgctctcaccaaaatgatatcctacgggggattacagatacaaatacgtaaacagatccatcgggaggaaactctcagatggaaatgagagctatgaagataacacaacagtacatgacaatacagagtgactggaaccaggaacatttctccgaggaataaaatttgaagcgagccatgagagggtctacaggtagagttcccaggcagagtgaacagccaagcacaaagctgcaccaggagagagaggtgctcgccgagagacagggaggggagtgtggcaggtgagctcagagaggggcagggccacacacatcggccacatgggccttggtagtgagtcgagatttgatcccagggtttattggagtggataagtaagcaaggtgactgaggtgctcgggtttacatttttatagttcaagctggctgctgggtggaaaacggaagttggcagaccaaggacagaatcaggcagacccatgtggaagtttctctagtggtctaggtggtggcttgggtagcgtggcagtattggagctggagaaacgcagatggattggagatttgttttggagtgacgccattctgtcttgtcaatggattggcgaaaaaagaggcatcaaagatgagttacacatcattgaagtgagaactagggagatgccagtactttatttagtattttctcagcagctcaatccataaataatttttggaagacaacaagcagtttcacaaactacttataagtcctcaagttccaaggtaattaacgtgggtgtctcattgcctcagagaacacagcgcagcacggaaattctacaagacctgacggacaggaacatctccgacttcttggtaaaaacgtatcctgctcttataagaagcaggtaagaagaaatccttttatgctttttatcctggctccctgtagaagatattaactagggacagaagataattttctctctcaatttatgtatgatcagggcagtagatttttttcttttttatctgatttgagggccccattcaacataaaaagcaattgaggcacatacaagtaaaatgtaacttaagattaattctttttttgttgtttgtttgtttgtttttacatttagggcaagcagtcttaaattttaacccacgtattattaaaagttatatcagaagaccatagaagttattcaaaaatgcagccacatattttaactagttaaaagagagagtaaaaatttggagggaggtggaggagtataggggaaaaggtagaagaaaaagagaaaataagtaagtggcaaaaaagagaaaggaaaaagatagggtgggaaagaggcagcgggacagtgtctgagtccagcacacgccagggcgagccaggtcaactgcagctgtcatattctaactgtgaattatcatctttgatcactgccctttgagatgccaatgaacttttcaagaaatatctagttctcttggctctccagctgttcttatcagccccatccaggatggaacagctttggcagcccgtatcagaacaagcagcttgacaggggcatgccatgccaggagagaggatcctaaggaagcgtggtccagtccgcacaggctctggggctttaagataaaacctcctgtctaactttagtaggactttctgttgcttcacctgccagagccctgaacgagggataaattgacttaattaactagaacacactgcaaatggtgaaagcatttagcaaaacaaagaatgccatccaagccccaaaataaaagcagaataaatagaatgcaataaacagcaaccatcccaaactgagttctcagcagcaaatctccagtatgaaattttggattttgtgcgtgtgtgcttaaaggtggatgacaatgacagttcatgggattgagctctggggtccagagttggcatctgttcatttcccattttgtcattttacccttgattgactgaatgtcagtgccttaactttgggctgtggagtgagtcggaactcccccgaggtgtgcaggtggttgttagagtctcatttttgcagggtggaagacaggagggctgcagccttcattccacactgacatggtcattgccgtgtgttctgggtccagatcaggcatattgacctgacatatgacctgacaacaggaccactcagaaagtccagcatgcgggatatgatttggagagccagtgggggaaatcataggtcctttctctgcatgtgtattcaggcaatgtcccagggctgggcggcttccgcattgcttggatatcggaaaatgcaaaaatgcccctgaagactgagacttcagtcttcaaaatgaatgtttgggaaagaaagttaacggcactgctgtacttgtggtattcattgcattattttattttggctttcagcttaaagagcaaattctgggtcaatgaacagaggtaagaaactatttttatcagaattaaaatctcagattgattcattgttgaaataattgcacacttttaaaaggcacacctcacagccatgaggaggggctgttctgtaggtgctcaggaagtcacaagacacgtcctgaagaatatgtggctagggacatcccagactcagaagacactcagtggtgcctcttcttggaggacataagtgggggtggcattccctgatgtggcgtttcagagcattctcacccaaaaaaagcttctaaaacctccaagtatataacagtttataatactccaacaagagggccttgtagcctaaacccgggacactccttggcccattccttttaagcttcagggagtgtgggccagccccagactcaccccattcctgaggcatcctggaggttgaaatatttccagaggtttagaacctcaccaagtgggactctaggagcctgctgcctcccagcctccctcaggaactgcacctccagaacaggtgcggggctgacatgtatgtgctttcctgggcagattctagaccgtacacatgaaatctggctttcaggattgctctccagagggacctgtggggcctcggctgagacagagagtaggagtgaggcagtgattcaaggccctgagaaagagctcctcctctgcttggtataaccagctaattcattctgttctgttgactttggcttctgccctgcctttgaagggtttgaggccagggagtgatgcactcagactggtgtttccacacagtcacttcagacttccagggcagtacaggagatagatcccagggccagtgaagaagcagagcacaagtccaggcaggagaggctaagggcctccctgaacaggtgtgaggcacagaagccccgagaggtagggatgacaggatgaagatgggtcctgtgctgctagaagtacctgcaaagcacagaggtggcacagaaaaggagtccttggctgggatgggaggagatgacatgtgacatgtgaaagaggacctggagttggctcgatgctcccaaaagggaaaggtgccgaggggagctagcagccatgcaaaggcagagacatgcaggcagtctgggccatgaggagctctggaagtgactcgatatgtccagaataggccactccagggaagggctgaggaaggatgaagttggagaggggcacagaccagatgcagaagggcctcagaggccaggatgagggtttggactccttcctggaggcagcagcagtgggaaaagagttaaaagctggtttgtaaagtggagccatgttgctcgctggtccaggcaattcccccgaaagttcatgtttccctacaaaacccgagagagctactagtaggcgtgaagttcgtggccctggtctgaggatttcctgtttccttgtcaggtatggaggaatttccattggaggaaagctcccagtcgtccccatcacgggggaagcacttgttgggtttttaagcgaccttggccggatcatgaatgtgagcggggtatgtaaacagactggagatttgagtaggatttttgacttgcttaactaccatgaatgagaaactctcatgagtgataacaggaaaaaaaaattaaaaccgtcttgtttgtttgtttacatggtttttagggccctatcactagagaggcctctaaagaaatacctgatttccttaaacatctagaaactgaagacaacattaaggtacttgacctatgtataatctgctctggagctaaaaatttacctgagctggttattttatttttactttcctaccttcattaaattccatccctcctcctgctgaaatctagcaaggaatgtcttccagctaccaaacccttcctgcttctcaaatttcctttccttcactgatttctgctttaactagctgttagtgcagcgtctcagatgtcctctccaccctctaggtgtggtttaataacaaaggctggcatgccctggtcagctttctcaatgtggcccacaacgccatcttacgggccagcctgcctaaggacaggagccccgaggagtatggaatcaccgtcattagccaacccctgaacctgaccaaggagcagctctcagagattacagtgtaagccaccacagccccagcctcaccactttcttgtcaccttctccactctttgaacatcctgagaggattctcaccaccgcgaagtgctgatttggatggtaatgctgtttagtcaggcacatatgaacatccgactttcaaataagtgcctcacacttcacataccagacctcttggtcattctttctccccaacatttatgtggcaagtaagtttacatttggttccattcccttttggcttttgatagcaagttgctcctggagcttatacaattattatctttgctatgtgcaaagcagctgccaggaactggcaaagttcagtaaacctttcagctccctcggagtaattatcttagattccaggaatttcctcagaagagcatactttggagatgtcgacagagctttgctaccctcaagctgaggctcttcttgcacagtttcagccagtggagacagtggccttgtgcgttttgtagtatgttcactctatttgaggcctacatggaggaggggttggtaggagcacctttgttagtgcaaacttcagcaacgttgtggggtcctgattttactatcctagcacacgctgagtgccagtgaacatgcccagggtcatccactaaaacctgggccttggctccttggtgtcttcctctggacaccctagggccctagactgtcctctgttaattctcactcagccacactttcgtgtgtctccttccagtcatttgttctaagcttactacgtgtatggatgatatgatctgtagttttatcaaggtagtgactaccacataggatacctttgtggaaattagtaaaaatgctcttttctgcaggtggacactgtcccatgccaggggttatggcttgtacataaagttcaggctggctttagccccaacttacccctcagccagatgccttctatttgtccgaggaaagaataaatagagccaagtccctgtacaacttgcctgccctcttttcacttaaatttacatcatgaacatttccttgtgttacgatgtacttcttgaaaatgtgatttaacaagatgattattaacaaaagataaatctcacagaccgtatgtctgtcaacatagaaaattcaagagactctatagacagattattagagctaatgagagcattgcagtacataagattaatataaacatctatttctatacaccataaaaataattagagaatataataaaaagaaaggttgtctagaaatattcacatgaaatagaaaggcaacccgcaaatacccatttaaccttggtccatatggattaagacagtttagtggagtgacagcttcaaggtagagaagaggaacctggaggccacacctgggcgggtgtaaggccttcccaaagcctgactttgtatcttctcctccttctgctcttccctcttcatcgccctctccctgtgtctctggccctgctgcaggctgaccacttcagtggatgctgtggttgccatctgcgtgattttctccatgtccttcgtcccagccagctttgtcctttatttgatccaggagcgggtgaacaaatccaagcacctccagtttatcagtggagtgagccccaccacctactgggtgaccaacttcctctgggacatcgtaagtgtcagtttacagcgcctccctcccctccgtgggcccaaggtggagcttgtgtgtgctctgaaggaccagaccaagaggggaggggttctcacggtgccagggctgctgaaaggcactgggccaagggccttgtgtatctgctgtcccttgacatcttctcagaaaggcacagaactaggagcccgaagctaggaaaggctgtggggtgcagcttaacaactggtgaacgggggctctctatgtcctgcactgaggggtcttctgacccatcaaataatcactgcaccgcaggcatgagtctggccttcctggcatcagtctggcgctgagaaggtaatatgaaggggtctttcaccccaagtccccttctcaaatcctgccccaccttcaaaagggtaaaggtaaaactttccctgtggtagggtcaccagataaatacaggacacccagttaaatttaatttcagatgatgaataatttttagtataagcatatgctacttcaaatattgcacaggacatatctacactaaaaaaaaaaaaaaaaaaaaaaaaaacctggttgtttatctgaaactcaaatttcactaggcatcctagatttttatttgccaaatctggcaaccccagccagtggccaaaataataagaccttcacttattagattaaccaccgctacagggaaaaatgaagaaaaaatatttattaaatcaatagcacactaccaccttcctgacaaccaaggttggtgggggtagggaggggtcaggatagcgtaccctattacaggctgcagggtcaaaggaattggtagtaaaggcctagttataatgtaacagggatcattatgacatcaaccccaatttattctaggtgtcttgagtagtaaaatctcaacattttaagaccaacatgagcctccatttcatgtgatgataagatataccaactgatggagaccaacacaaatgaccttctcatccatggttttttaaaatgatggtgaatattggaattcctgaagatatgatttctatcttactcagcttagtaagcagctatcacttaacaatacaaaaccagagattatcagtagcaactaaattatttcctctctcttctgtctacacgaggaaacactcataaatgcacggggaggaggtcagaacctgaaagcctttctttggataagagcatcaactgcaggtaccacattggccctgtgatgctaatataaaaggagctaggcccaccggtaccgaaaagttacttagaaaagtgcggaggcttttaattttactttttttaaaagataagaaatagaatttacacacttggggctggcccacgtgtttctgtgtgtgtgtatgtgtgcacgcacgcgcgtgtgcgcttacagggatctctgagcctatggagagagatgtagctaggatagagtggacatctgaggtgggaggtgatactagctggcagtccaatgaaggggtagaagatggtaggcatcatgttagcaggctttctgatgctccagaattttaaagctggcctggaatctcacctccgcgatccatcattttggaacttaggaccaccattagccagtggcaaaaaaaaagttgaatgaaggaacaaacaattattgcttatgtaattcacttagcacatatatgatgttttaaattcttatatgtgtcatctatttttctttactttaaaattttgcaacagttacagacttatggaaaagtcacaagtacagttgaaacctttttttcttagtcatttgaaagtaacttctcagcaagatgccccttctcatttatttctctcttcctgtctctctctctcacacccctcagcacgtccgatgtatacttcctacaaacgaggatacaccccatacaaccacaacacaaactgtcaacatgaggaaaccagcactgatgtgtcatcaccacctaatcctcacaccccactcctctttcgcccattgccccagtgatgtctttcagaaaaaaggatctagctcagaatcatgcatgacatttgattgtgctgtttctttagtctcgttcagcctggaagagttccacagtcttttgttaacactcatggtcttgacactttgaggactgcaggctggttattttgcagaatgtcccttggtctgagcttgtctgaggtttcctcttgcccaggttgagggtgtgcatcttggcagcagtatcagcaaacagatgctgtgttctcactgcatcctatcaggtggcttctgatttcaatttgctctgttactgatgatgttcaattcggtcacttaagaaggtgtctgctgagcttcttcactgtaaaattactcttttcccctttataataaatacaaatttcaggtagaggcacttcaaagatatataaatatcctattcattatacaattttccatttattcatccatttatttatctctgtatgcagtcatggttcatgtgttaatcaatggactatgatccaagactatcattatttattttgatattcacattatccccactgtggtcagtggggggccgttgaagctggcttctgtatcgtcttgacttgggtcctcatgcccctggacctcctccatgctcaatggcacagcaagatattccaggctcatccttccattatccccattcctaccctctccccaagaagccctggttcctgccagtgggaagtggccctcagaagccaaggtctgagtgctagatatgttcattgcctctggagcaccattggtcccaggccttctcagtgatagaactagggaagatatggatgtacacacacaggtatgcacacacctctatctatagttctctatctacctatacagtgaacactatgagctctccaaaaccaactccacagggctcattctagttttttttctttccacatctgtaactcccttctccaacagtgagacgctggcttctctcactcccaactcatttatctaccggacctatacacctgaacagtgcccaactctgccaccatcccctccccatgtggatgccgtcctctccctgctccagctgcctctgctgcatgcaggtcctcctcgttctgctctggctctgataccctgcaccagatcagcctcctgtaaggatatctttctcatcccgttgaggcctccacaccccacggcaggttgccccctgaggaagcccgtctctggttcttgccctgctcctgatcaccatggctcctcccctaaccccactgttgccgtcccctttctgtgcccagtatagtggctgtaggactaaattgtttaaaaagggtatcattatttatttgagctttgtgaagccaagaactaggctttaagtttttctgaattctgaagacatgcttagaaagaagaatcaacaaaactttatgaccaaatagaaagagtgagagaccaggcagaattttgtaattgatcctttcaaaagatacaaactaaaggttcccttggcagggaggtagggcatggggtggggtaggaggactagtgacagcttaacatatgtttgccaaccaagaactgtttaaaaagcaagtcgaatcagaatcccagaccctacgagctggaggagcctggccccacccctcattttgcagagctggcagcaggtctgagaggttaagtgacttgctctcctcttctctttccgagatgaattattccgtgagtgctgggctggtggtgggcatcttcatcgggtttcagaagaaagcctacacttctccagaaaaccttcctgcccttgtggcactgctcctgctgtatgggtaagccgtttgggccattagctaatgcctctgaagagaagcctggtggtgggggtgggggatcatctcctgacagaaaacctgggctgtcctgtggtggtagcacccacaagtttagcttccggccccaggtagggtctgaagctgataaccagggatctgtctggcttctgattctgactccactgacagaggtatctctgaggcctggtcctgtcagtgacaatgagagaagtcccacatgatctgaatctcctactcaaactgaggccttgaccaaagcctgggggcagccattccccaacccctcacccagctctgactctcactcatctgtggccaatctgtccacctcagtgtccccatgtgaactggccaagagttaccgcccacagtagaagactccggccaaaaagctcctcctgagtcagggacagaggatgacacaggggttacatcagcagagttacagggcccagcatgcaactttctttcccacgtgtgtaaatttgaatgagtaattcatccatctcggcctcagtttcctcatctgtaaaagaaaatagtgatcctggtccttcctctgtgggccagtagagccttgccaaagcattgttctccacatctttctcttggaaatagagaatttgggaaccaacctgactataagctgtgaagatgagctcactgggctcatctgagatgacctcagctgggctttgctgacccaggctagagtgggaggtgttgcaggctggagaaccctcctatgaattgtacagggctttgtagtttacagagtatatacacagctagcagcccatttgctcctcacaaaaccccatgaagtggtcaaggcaggcatcattatctccatttaaagttgaggcacagagaccaacaaatggagtatctctctggtcccctgggactctggccagttcacacacatcacctcaggtgtaaggggagtgcattatatccagacgtattgtaggtggaatggaatgtggaactccatcactctgagttgtctcatttcacacagatgggcggtcattcccatgatgtacccagcatccttcctgtttgatgtccccagcacagcctatgtggctttatcttgtgctaatctgttcatcggcatcaacagcagtgctattaccttcatcttggaattatttgagaataaccgggtgagcataactttcttggcttttttgtttgattagtaggatagtagagtatgtgttggtcgagcagagccaggggcaagcatcgtacatgtagcagctgtatgcggatgagtgccactttcttcctccctacccccgaccctgcctcctttccttccttccttcctcccatccttccttcctctttccttcttctcctccctcctccctccttcccccgtccctccttccttcctttttcattgcttccttccttccttcgtccctccttcccttcctctttccttctgccctctctccctttttcctttcatcctccctccatccctccctccatccttccttctttcttccttctttccttcctataagcacctttttcatttctgtgctctgaatgaaatggttttctgtgtttattctgcaagcaaaacttgattcttgcaataaactttaagctttgcttactctttcagaaaggttttctcagggactttgggtgttgggttttacacacacacacatcaatacatttgggtaatttcaaaatctaaaaggaacaaaaaggcatacaatgaaaaaatctccttcctacccctgtttcccactcatgcagttctcttctccagaggcaaactcttacttgagtttcctgtgtgctctggagacacatcagcagatccctatacggtctttctcccgctttcttatggaaattgtaacactctgacatatactattccttgggcaagttaatcttgatgaagagactgggtgttctccatgctgaatgcctcacttttatgagctgccaagcccagttgtcccttccacctgacctccccctgtccagagacagatggccaaactgaatcataaaaagagggggaaaaaaagaaggcagtcgctgcagggctgtctttactccacactccacactcccagtccccaccgctgtgtctgagtcctggctgtggctgtccttggaacatttgcctcaccacgtgcctgtgtccccaggcgcctcaacctttcctctcctcattagctcttcccagttcagagggtgggaccggccagcacatctgcactgctgccctgccacacccacctccacctgcctctgggccccactggggaacacaggacaaatctgtgcggaggccccaccatgaaccgcccagacccgtggacccctgagactgactctttccagatcttgttagggtttcgtggctgctaggcaagtaacgaagcctcatctgtcccatgaatgataagaaattcagcatgtcagagtcagactctggaaaggcggggggataagaacacagccccagcagatggccagagcacccaggtgactgaaagtgctgctttgcagagctgtgtttgccacaggctcacagcccactaagtcttaagacagttttccttcagaataattaaatagccagcttaaagcaactcagaacattttcccctctgaggctgcacccatttagccaacatttgctaagcacccgccttcaaaaacctggtattttcatgtaaattatccgatacacagctgctatggaaacccccagtatcccacaggaagctccccagctcccagcagctgccggcccgtgtgagatcaggaggtctttaccagctgaacaccacgtgccgggtgtgtgctgatataaacaagcgtggcccactcgtcctgccctccagaggctcccgttccagtcggaaaaggacctgcccacgaagtttgcaacgatataagccacagtgtatgatcctccataatacagcgtgtgacagagcagcagaggagcgaggcagataacatgctgcaggccagaggcagcgggaagagccaggctgcaggggctgggggagccgtggtggaggaagttcaatttcagcctgtagatttctattagcccatttaataaataatgaagtgcctactctgagctaatcattgtgcaggtatttaggaaggacaaaaaaataattaggactcagtgcccaccctccaggggcccactgactagtagagaaagtaggcagatttttaaaaaattaatcatgggaatgtgataagtgctgggagagaggaatggatactttctcatgggaatcttggaaggcttgtaagggaaggcactctctgagccagctgtctaaagaagaacaggaatctttaagaaagcagaagggaaaagagcattctttcctgcttggagcaataggtaacagcctgcacatgcccaggcctagaggccaaagagcacagtgattccagaaagagtggggagaaagggtaggcagggaaggatgaggtaatgtgggcgcaggtgtggaggctggagagggaggaggttgtgggactgggaggagccagatggaatggacagcagtggcccagccaggagctatgctggcctcgtacgcctcgatgtcccttctattttctcaggggaggctctgcccaacatgccaagtccgaccacttgaaaacaagtccctggcttaacacagaccccagagagagtctccaaccctcctctccctagacaatggtagttgccctgtgaggggctgaaaagcagagctggagatggctcagggcctggtgttaacaaatgccttgagggctcctgttgtttcaaagtgagtctgcagggagagctccctaagtggacagcaggagggctgcagcttctctgcacattcctgctgtcacccccagagtcacctaggggaggggtaaggacagtaatgcaggttcctcacagttagcctcggtgcccacatggtactgagcatagtaaatgtttagaagatgctgcctggctagacaaaggggaagctcccgcccactagaaacttgcagggagccccagtccttgattggtcatttaattgattagctccttggcctggccttgaggcactgcttgtaagtacttcatgacctccattgcaaacccatgatgctctgctggacaaatccctccagtggccagtctggctgcaaggactctctgtctgcaggccttgccctgtgctgtcctgtgagagcatctgggccccacctgctgaagagagggggggtggggtttgccccgtttccaacagtcctacttctctgtttcagacgctgctcaggttcaacgccgtgctgaggaagctgctcattgtcttcccccacttctgcctgggccggggcctcattgaccttgcactgagccaggctgtgacagatgtctatgcccggtttggtgggtggtagccgaggcccatggagcatgggccctgggtccaaagctgggagggttaccgggggggctcctgcatcagactgtggcaggggctggtgctaggaggggaccttgttgggctggaggtgtcctgccagctggagaggattagggtgcctctgtttccatggctggggagccacaggagggatggagggcagcccttatgaggcgggtgtttggctcttgctcagttcccacataaggcctggtctagtgggccctgtgctgtggccaggtctgtggggtgagctggggcggctgaagtggactcaattcctgttgatgcccaggtgaggagcactctgcaaatccgttccactgggacctgattgggaagaacctgtttgccatggtggtggaaggggtggtgtacttcctcctgaccctgctggtccagcgccacttcttcctctcccaatggtacgtccatgccacaccctgggccagtgggcagctcagggcatccagaactggaccttatacccacatggtcatttctttcctcaggagccccactccacaatgttttttctacattctcaaagcctggcttttctccaataatacaagtagaggatcgggttaaaataggcacattcaaatatgtgaagagcatccactttaaaatatttaaaatgcagtgctattaatttcaattgctgatatttaatccttctcatttaattaccaaatgtgtattttgattagatgatagtattgcaaataacaatggttacagggtatccaaagtactaggaaatagactaatgtatttatgagagaaaggacacagcaggcccctttgctaattagagatttgggagcatgggagtaatatgggagccatgtggaggggtgcgggcagtgatcacgaccccccactcctggaggaaggtgggtagctgccaaccctgacttttgaccagggcttctcaaatgccaggttagctggcaattgccattcttccgcaggctcttcctgaagctgggtgggcccctgcctcactcccctctgcaatccagtcctacctttattgtcctcacccaggggcctgaattgccaagcagcagcccttcctagcaagctttccccaatagtgttttgtttcttaacttttcctcctctcaggctgagtgtggtcacctgtaaatagattccaaggacttggttttatgttttgatccacagggaattgatttattggaaatgaatctgcctttctactcacaggactgtgagaggtgaatgagatcacaggtgtcaacacacgcctgatgaaacaggatacacaagcagttctagttatgggagacagtgtcaggaattgttgtccttggcaccctcagcccctgcagaccctttctgcagccttggccataccttttagaggcttttgtgtgggagagagcaggtcaggaggttgactacccaaattgactcattagcttcaaactctgatgtcaacacatttgaatgagtcctgcctgctttagggcctaaagaggaccagagaagtacaccatagtccctggcttccagaaggtcagggagggtttcaaagaagaggctgtgtctttaagaatggggaagattccatttggtggggcaggaggaggagaacattgagggactggaaacacatgcggaggctgggagacgggaatgaccaataggactgggaaccagggggagatgccaattgctgacagaggagttagtgcaagaggtaagtgagaagggtaggtggggctggattgcagggctgtaactacagctgcagagggagggcttcaacctacagctgatggggaacaacagaaggttttgaggcatgaggtggcctgatgacaactctgttttggaaaggtggagttggcagggcagactggaggaagtgggaggctcggaggttagtaactaccccttactgagtgcttgctgtagaggaagcattttagtcctgacggtgatcccaggccctgagtctttactctgtgccaggcactgtgctgagttcatcttcagcacaatcctatgagacaggtattgttaccctcctcctcatcacatggttgaagtaggcaaggttcagagaggtccaatgcccaagatcacacatgaggaggccaggactggaacccaaggctgactctggacatgagcacctgacctctctacctaatgcctaatgcctctcctgctgggagccctttttagaatttaagtcttaaaggatggaagcccagaaggaagcagaagcaaggaagtggaagagaggtcccatggaaaggacagtgccaaggacactgtacagccagcccaatcctgaccccttttcttcatctaggattgccgagcccactaaggagcccattgttgatgaagatgatgatgtggctgaagaaagacaaagaattattactggtggaaataaaactgacatcttaaggctacatgaactaaccaaggtaagggaatgggtatgagtttggaggtgctggttagatccacagttggcatgatgttgccattttccttctatagaacaattgatatgcttatgcaagcaatttggttcccagttttatgtagggtcatcatccctgtgttataactcgtcttccaagagcatctaattccaatgtgtgttccctgctattcatctcgggcactgacacagggcctcagtgagaatcactccagctgagcatcattcccttttctgtgttctgtttctgcagagcatgggtcagcctcgagatgtctcagtactcaccacacctctgtgcctgcccatgtcaatatgtaacctcctagtgctggtagttttctcctaaaccatcctttgctctttgttccctcttcccctccttgctctcaccctgtctcagttctcagtccggtttcttcgtatcttgcagatttatccaggcacctccagcccagcagtggacaggctgtgtgtcggagttcgccctggagaggtgggtactctgcagaccacgtgtgaaaggcttccgaacatcagctcttgtgcctgcctctcctccccataaggcagagctattcaataggaacataatgccataatgcaagtcacatatgtaattttaaatcttccactagccacatgagaaaagtaaaaagaaaataggtaaaattaatttcattagtattttttattttactcaatataaccaaaatattatttcaaaatgtaattaatagaaaaccttattaatgaaatatttgacaatttctcgttgtttttaagtctttgaatctttacactcagggcccgtgtcaactgggacttagatgtgtttcaagtgcttagtagccacatatggctcgtggcctctgatggcagcccaggtctaaaattcctcccccagctcacacacacacttaccctggggcctgacattttagaccttcttgatctctagggccaggctagctctgtgttttctcctagtgctttggcctcctgggagtgaatggtgccggcaaaacaaccacattcaagatgctcactggggacaccacagtgacctcaggggatgccaccgtagcaggcaagaggtgagtatcctgctcctcctgtctcagggagtctctcacaggtcctgtgagaagaataggaagggtgatcatcagaccctatagtagggtggctctgaggccctgaaagatctgtacagagaaggaggcctcccagagagcatggcccaaaaagcccaacacatagacccaatggaaaagtgaactgaattgtgatagttaagagattcctctgttgggatggattcttggaaagacctgggaagcactaagtgtgtggttcttaatctcttagaggtcacggaaccttttaagcatctgatgaatatttgtagcctattcctataaaaatgcaccattgcttcccattacctccctccacacatttttacaaaacgtttcagggagtttactgagccccaggtcacatttatgatcctgcaggagctcttgaatcccaggttaagaacccctgtgatgaatgaagaatccttcctctgggttgagtttctagataggggctcatgcatgggcctttggggtagcctaacctgcattggctatttgtaggctgatatttggctttgccagaccaaggagcatagagggaaaactggcgtgtgcccttggattctggagggtgactgctgctctctgtaataaaatgtgtttaaacagactggtcccctatgggcaggacagagaggatgagctctcactcatctgcctctttcctggctgcaggaaaagcttgaacagtaaaacttcagcacacacaatagaggtgcccagaggaagcctctgccctggtttataagtggagttaggtgctgctgacatctgtccagcatctgcttgactggggcctcttcctctctcctgaaagccatcctcagcatggcccaatgcccagtgggcaggacgagtcctgagcacgcttcactggctcagacaggatgaatttgattctttggcctccatagccagccctactgggtttacagaaaagggacaggcaggggtgaagccaggtcatggctgagtccatctcaacagatccagcttcacctgcaagtgaccacgcaggtgacttcctcatggtgacaaaaggagtcatggcagggtagagatatcataccatggcaggggaaagatatcatagaattttccatgagcacatttatgagacatcaagttacaactgtgtccaagtgaggcacagtctgacatccagaaggtaaaactgagctggacgctagaaagaaactataggcttaagacacagaattgggattatatggtagggtagctcccactaatttggaaacgtaccctacttgcttccctgagtagttttaattggcccagccatgcctttggtggcttttgtcattgtggggaactgtaatggtctctctgtaccatcctatatcatccatcctttattcatagaccctaagctataagaagaaaaggatgagattagactaaatgtctatgtatagtttattttccatcttggcaatatattttttagtgggggtgaatatattagccaaagggagttggtggaacccaactcactctacccctgctccctgcaggcctctcgctgtgggtagttatctgactggctcctctttcattgctatctttgccaataaatacagatagagaagtttacttccatcgggacacatgcatcttttctagttacttcccaaatgtctgaaaattattgataaatcatgaatcattttcttaaacctgatcttccctctgtttttaaactcacatgtgaggtgatctgatccaaaatgaaagctgacttttggcgtaacagggattcaattaatcctagacatggaaacatggaagaatctgacaggattcagtttctaaccgaagggcccctgttttgattcccaaatatcccatgcatttctgaagccaaataggagaagagaagaagcagcttccttttcccgttggcagaagcttctccagccctagctctatggtcatccctccactccttgaaggatactcagtaattgctttttttcttgcagtattttaaccaatatttctgaagtccatcaaaatatgggctactgtcctcagtttgatgcaattgatgagctgctcacaggacgagaacatctttacctttatgcccggcttcgaggtgtaccagcagaagaaatcgaaaaggtgaaaaatgttttgttgtggccacataggagtctggttaattacaagcctgtttcatgagagtgcattctcttggagatgagaaactgaagcgtgctattcattcattcattccaacaaatgtttactatgtgtctactgtgtgccaagtactgttctagaaaccaggagtatagcagtgaacaagacagacaaaaaaaaatccccactctcatatctaacaaaatgttgtatgcatttatcctctgactcagcaatcacacgtctaagagtttatcctgaagatgcatctcccacagtgcaaaatgaatatgtataaggtgatccattgcatttgtaattgcaaaatgctggaagttacctaaatgtttagtcattgtagattggctgaataatttatggtacagacacacaataaagtcttacgcaactataaaaaagaagaagaaaagtctcagtaaactgatatggagatatttccagtaaatactgttaaatgataaaaagcaaagtggaaaacagaacatagagaacgctactttgtatgtaagaaagaaggaaaaacaagaaagtaaacgtatgtctgcttacctttgcaaatagaacgtagaaaggataaaccagaaaacaatgaatttggtgatcaacaagaagaaaatgggaagaaagaaaaatgggaggaaacagtacttctggggatatatttttgtatagttttaatttttggaagcatgttaatgttccacatattcaaaaaaaatcagtaagaatgggaagtaggcaaaaatgaaaacaaaaagaaaacctaacactgacagcaaactaaataaagtaacccaattttatttcaaataaatatcataatcttgcaaaagggggatagagctaacacaaacaactgctgaacacagtgtttgactctatatcctcattcttgggcagggtggagcgggggagaagaactacaaataatttctgagttctttttagtttgttttttatagtggtataggcaaagtgattctgaaaattttagatgtgttacaggattaaataaattaataaatgttttgatgttattgggacccagaattctcaccgtggaagaagggacttacaaatatggaaaagggaaaagcaagaaagaactgtgaggtcatggataggaaccggaggtagcactgggaattcaggaatatttatatgcttgtgtttgtgggtgcatgcagatgtgttcatgtttcatgcacataggcatgtatatatagacatatatttgcatgtgtgtatctgtcttccgaaaggctcaagaagcaaaaacaccccagtagccatgagcacacttagcactcaggcttttgtcttaataacattccccactaaaagtaaccctgattcctccaataaatgataagttccagggctggaatggcataggtataaaatgaacctggaatatcttatgccagaaagtaaggaagtgcttttaaaaaaaaaataaggggctgggcatggtggctcacacctgtaatcgcagcactttgggaggccaaggtaggaagatcgcttgagcccaggagttccagattagcctgtgcaacatagggagaccctgtctctacaaaaaattagcaaacaaattagctgggcctggtggtgcacgcctatagtcccagctactcaggtggctgaggtgggaggaatgcttgagcccaggaggttgaggctgcagtgagctgtgatcaagccactgctctccagcctgggaaacagagcaagactctgtctcttaaaataataataatataattttaaagaaataaaagtaactctgtacagattgcttattggttacatgggagaaacataataattttacaatggagaaattagacagcaccttaactgggtgatcaaaattaaccataaggggcagatggacatctcatgccccgagatgtgataccctgtgaaggacacaatttcacttatgtagaatccagattggagatatgtaacctgaatcttatcatgaggaaacatctgacaagctccaaagaaggaatattccttaaaaaaaaaaaaaggagactgtattcttcaaaaacataagagtcataaaagacaaagaaagagctatggaaatatctctgatcgcaggaggctaaacaggcataatgactgaatagcagacaatagactacatcttgtgcagaagagaaaaaaaatgatagaaggatattattggaccaactgacaaaactgaactatgaacagtagattaggtaaatgtatcataacattaagtttactgacattgataatgtactgtggttatgtaagagaagatctctattcttaggaaatatgccctgaagtatttaggagtgaagggctgtgatgagtaatttaccctcaaatgggtcacaaaaaattgtgtgtgagagagagaagggttttattagttaataattctatgaactatttttattcctatatgtttgtgtgagtttgaaactatttccaaataaaaagttaaaaatggagattacattctagtgggagggatagacgatctgtagataaataggtaaaatatccagtacattagagagtgaaaagtcctcagggaaaagtaacgcagggaggaactgctggggcagggtttgcattttgaggtagggtggcccagggagagcctgcagaggagagaacctgaatgaagaactagaggtgagagaaggagccacgtgcacacctagggaggaacattccaggcacgggggactagtatagaaggcagaagcatggtgagcttgtctccagtggcttccctagatcccctcctgcgcatgtgcacacacacctggtgtctctgtcatcgttccctcacagcactgtcacgatctgccagtattctgtttattttgactgccacctccccgcagtctgaggatagcagcaatggctgtgttcacattgttctccagtgcctggttcagtgcctggcgtatggtcagtgctccataggtatgtgtcggatgcacaaggctttgggtgtaaccctcttgacgggtgggatcaacaggtctgggactcaccatcttctcaaacagagccttcctcctccactgctagccatggtccaggacgctgggcgagacccactgtcttgctctttgtaaggctgaagtccatttcccaggcggctacacccaacagatgctgagcaggctgggccaccctgggatccaagacacagagagaaagagcccctgtctggcgcctgaagcacatgccagaggacaggagccagcaggagcctgtttcagcctagctggggatttcattctggaggcgtgagatctgggagcccaaggctttgaactgggggaggtttggggtgtttgcttgtcttctccaaatggcatttctttctcttccctaggttgcaaactggagtattaagagcctgggcctgactgtctacgccgactgcctggctggcacgtacagtgggggcaacaagcggaaactctccacagccatcgcactcattggctgcccaccgctggtgctgctggtaactgcgggcttgggccgcaccaagggcttaaaccaagtgctgggtctcttgggttggggaaataggttctgggtcggcagatttagaaactgcagcagtttggctttagtctggactgtttcctgtgttgctcattttgagcgatcagcccagtgtttggttcacacagctccggagaaaaacaagtcacggcacagccttgacttgggactgcgcacatcctgcgttcccaggatgtctcctgtggggccatcggctcacagccgggaagttcagcccactctgcggcctgtcggtgtctggtccccatacaggagcactgagctgggtcaaaggctcctgagctgagccaggccaggcctgaggccatgcccacgcagcccaaggatcatgagggcacaggacatagcgggaaccaaggaagtgacctgagtgacctccctgccttctgacaaatgtatttgcaggattttctttttttgaggagaattctgtcattgccttaatccactttaatcccctcgtgggctgaaatgggcccaggatggacgccacgcttctttactcttggatccacctcctgccttccctaccctacaccagggtacccctgtcttgctcaagtgaggggagtgactgtgtgcgccttctgtcagctcatcctccacaggggagccagcccagggggaagcagtaatcagaagggccagctcccagcctgtgcccccaaccttctctccaccccccaggatgagcccaccacagggatggacccccaggcacgccgcatgctgtggaacgtcatcgtgagcatcatcagagaagggagggctgtggtcctcacatcccacaggcaagagattcccagggctggggaaggtgggtgggaatcctctcctgctcacctcctctctcctgccccacagcatggaagaatgtgaggcactgtgtacccggctggccatcatggtaaagggcgcctttcgatgtatgggcaccattcagcatctcaagtccaagtaagcagatggtggggcgtgccccttgttgccttctgtggatccacctggatcctgtgttctccattgacacttggaagagtcctgctgctccgtcatcccctggggcagaggcaggtggtggctgggcctcattctccagcagcagatggagaaggccatcatgctgataagaaactcctctatattggcctaatttcctgtggtcgaagactcgcccaagtctctggatggggcatctgatcaggatgcatgcagagcctggctgggatgagggagggctgctaccactgcctcaatatttcaccacttatctcaacagatccgggacctgtggcctatttactaagagtccactccaatgtaggaatggttaggagaccaactgacttgaggacccatctttgtttttagaatattgtatgcttttgagtttgaaaaaagaccatatgttatatgacaaaccaacaatggcagtaatcttgaataggattatccttatcctgtacccacacattgtaaactattgtagataattccttattattaagagtttgcatgccaaagctaacagtttaagattatcagcatattgccgtgctcattcacgttctgatatgctttataacctagaaaagagcagagttacaattactcatttatttaacaaacacttattaagagctcagaatataagtcactaagctggttggtgggaggaacagcacataacccaccttatctatgctgaggtgcataatcctgatgcacccacaggagggtgttacacagaagatgtcatcctttcatatgtgtcagagcagataaataattgagagaaaggtctaatagattagctgcttgtggcaagtggacgtttgacccatgatttattgagcaactacaacttggacactgcatagatatctatagaaatagcagcatgtcaggtcaccagacctgtgtcagcaacttcctgtgtccaactgctggagaaagggaagtctcctattcctttccctccagctccttaatatctccatgatagagggggtgagaggggagtgttccctgtgtggagggatggtgagttttctggagctgaaaggtaaacagcctttctcctctgcatcttactgcagaggagaacagccctagactgtggaggaagctttggagtcagttatgactgacacaggataccagggcatagggtactgacacccgctagccgtgcacacactctctggtggaccatcactcatccaagagagggtaaccagccatcctgctgaaggagaaagaaagcaccaatggcccaagccctagcagctccattgtttcaggaagcttcctcagggaagtgctgccttcccgagcctttgctcccacctggcccatcagcccttaccaccactcagtatgcactggtccacgtgtctttatgggcagtcttgggatccccacactgggctaaaactacctttgacggccaggtgcagtggcttacacctgtaatcctatcactttgggaagctgaggcaggtggatcacttgaggtcaggagttcgagaccagcctggccaacacggtgaaaccctgtctctactaaaaatacaaaaattagatgggcatggtggtatgcacctgtaatcccacctactcgggaaactgaggcacaagaattgcttgaactcagaaggcagaggttgcagtgaatcgagatcacaccactgcactccagcctgggtgaaacagcaagactctgtctcaaaaaataaaataggctgggcgtggtggctcatgcctgtaatcccagcactttgggaggccaaggcgggcggatcacttgaggtcaggagtttaagaccagcctggccaacatagtgaaaccctgtctctactaaaaatacaaaaaaaaaaaaaaaaattagccgagtgtggtggcaggtgcctgtagttccagcctctcaggagactgaggcaggagaattgcttgaacccaggaggcggaggttgcagtgagccaagatcatgccactgtactccagcctgggcaacggtgagactgtctcaaataaaataaaataaaataaaataaaataaaataaaataaaataaataaaataaaataaataaaactacctttgacttcagcaagtacgattatcccacattaccatgcagacatttgatctctaaaaactggtatcaaatgatttctccagggactaccatggtttttctctcctagttttcagtatgtacacaggtctatggtatgggcctttaatccccagtatttctttttttgttgttcttgtttgggtttgtttcttgtttttcggtttttttgagacagggtctcactctgtcacccaggctggagtgcagtggcatgatcatggctcactgtagccttgacctcctatgctcaagtgatcctcccgcctcagcctcccaagtagctgggaccacaggcatgtgccaccatgccctgctaattttcgtagagacagggtctttcttgttgcccaggcttatcttacattcctgagctcaagtgatcctcccacctctacctcccaaattgctgggatttcaggtgtgagccaccaagctgagcttaatccccaaaatttctgatgagtctactccttattttgggattaccttaggcccaaccactaacagaggcctgtcctgcactgtgtgcatcccctagatttggagatggctatatcgtcacaatgaagatcaaatccccgaaggacgacctgcttcctgacctgaaccctgtggagcagttcttccaggggaacttcccaggcagtgtgcagagggagaggcactacaacatgctccagttccaggtctcctcctcctccctggcgaggatcttccagctcctcctctcccacaaggacagcctgctcatcgaggagtactcagtcacacagaccacactggaccaggcaagttggccctggggcaccgagagctgagcaaagactggtccagaacacccagtgtgggttggaattgccataagagggaggcataacattcccgatttttaacaaactcttgccctctgtttattggggtaaaagctgatatatcagaaattgttttctaacaatattttttagtcatcaggaaacttcattgattcttttttttacattttccttccctgtgatgctatggtgtgttatttcattcttgctcgtttgtggtggtggtttttccttcaaatcagctttattgatgtgtaattaacatacgatgaaacacaggttctttgggaggccaaggcaggaggatcacttgagcccaggagtttaagacaggcccatgtaacaaagtgagactttgtctctacagaaaaaaaaaaaaaaaatcagaaaattagccaggcgtggtggtgcatgcctgtggtcccatctacatgggaggttgaggaaggaagattgctggagcccaggaggtcaaggctgcaatgagctgtgttcataccactgcactctagtctgggtgacagagcaagcccctgtctcaaaaaagcaaaacaaaacaaaaacacctattttaaatgtacagtttagtgagttttgataaacgtgcattccatgtgtggtttttaaaaatgtaatcacattttttattgcggtaaaatataataacataaaattgaccatgccaaccatgtttaagtgcacagtgcagtggcactaagtacatttacattgttgtgcaaccgttaccaccatccccgatagaactctttcatcttgcttcagtgaaaatctgtgcccattaaacactaactcaccacttactgcccccctcgcccttggcaactactgttctactttctgtctctaaggctctgactactatagatacctcatataagtggaatcatacagtgtttgtccttttgtgtctggcttattatgcgaggacttagcataatgtcctcaaggttcatccgtgttgtatcatgtgccagaatttccttcctttttcaggccgaataatattcctttgtacgtatatgtgctacattttgttcatccatctattcattcattgatagacatttgggttgtttctgggttttgtgtttttatatatgtttttttaaaaataaacatctttagagacagttcagtaaagcagtggaaacagggaagtctccatttaacccctgaggatctggctcacctgcaccttctcatcagcattaagcagagggaggcacgagcaggagccacctgcacactcaatgaggagctgaacagggatcaattacctttttttttagttattaggatgctgctagctgagaatctgccttgccttgattaccccaatgtctggtgcccaagtcccttgagtcctccagcaggaactcctgtggcatcactcaggagtctagtctaagaagctagctctgaccagggcagtggtggccaggcttctgtgagtgggccagcctcccccgggtaggacacaagccataccagcagggctgtatgtgaactgtggaaaatagagagcaaagtgggtaggtgggtgtagggtgctgttttcctggaaatatctacctaatctcgctcttctcttacctctaggtgtttgtaaattttgctaaacagcagactgaaagtcatgacctccctctgcaccctcgagctgctggagccagtcgacaagcccaggtacccctgctgcttatgcagtccacagcttgaggcagttccttggctcagagcccagctggttcactgggcttgagttgctccaaggctcagatatgcctcctacagagagccccacccacaccacggtccctaccaagtccccaccacatcctcatcacatccttgctaagtccctgccactgtgtgttctgtgctgaagaacttttcattcagtagttgtaggggttcctattgtaatcaggaaaccatctggatagcatgggagagcatttttgaaaagaactttcccatgtttttgcttacagcaaaaaagcttggatttggggaataaggagcagagaaggtaatagagaatattagaatgttttgggtgcttgacatctatgtctggacatgtgtttgagtttcaagggaagggacttaactggcacatcatttcagtgtcagacacatttggttagatcaaggaatagcatctgttgtaggaagagggctctttgttctttataaaaattacaagaagatggagaaagaagcaataggaggtatgtctcctggcttgtgataactcttggaataggtgcttgtaggttcctgccctggcacagtgccccatgtaaggagcacaccacccaagaaggagagagctagagcaagtactggaggaggcaccagcatcccaatgccttggcttaagcctgggattgtagagggatgaattagccactctcttctgacttacctggagagtaaatcaaatcaaatcaagaagcaaggatatgcaaaaaccttatttccccataaagtttttattctgcccagtttctggattgcaagaaaaaccaaatacagctaatgattgaaacactgctgtctaaagcagtgcttgtgatgaattttttcccttcctcttgaccagcagagacctaatggctacttggcaaaactgactttgtcttcccaccccttacctgccagagggcccagaaatgcctaaggctcctttagttacagaaagtttgcttttactgagatcttccagccactgattcccatttatagatctggtgattgctgttgacatcagttgaaaattatttttaaaaaccacttgcagttgcaaatcctttttataactctgtaactcagaatatagaattgggtagcaaaattgtttcccagaattaccaatggtctccccacccctgcctggcatgttccctcttaaaggactaatcccaccacatcacctctgggccaggcagaacatcaggggtgctgatgttctgtgatctacagcagttaattccaaacttttctcccttattggatgagatcatttttctattgtgttttttacatttttgttcacaaagattagaaaacctgcaacacacttattggcatatttttctgataattttcatccaaaacctaattctgactttacaacatactatctttacaaaggtttgcaaaaattctttcatatagcattgtatatgtctgtcatgaaataatagtaagtatattattgtttacattataccacttcaaaataatttcctttaaagtattcttcaaacaagaaaaaggcaatttctctcaagaagttttagagagaatttacaacttgctcctaagcaaatgtgagaacttcaggaggttcatctggccattggctttacaactccaaattgtgagccaggaccacacagatatttctctagaaatcagcgtttgcttaccaagaacatttttactctccaaaggactccatcctggaaaacatgttttgggataaggtcttatgcaatcttatactctgttattaaaaccagtgagggtcaaggtgttaatagattaagtagtgacagatgatcagacaacttagaaacatcctaaataggttaataattatgtgaccatcgcatgtgcattcccaaattaggaacaactcagatcaatttctaatccttattcttacactgttccagttcccccatataactcgtatctttgtgttagtttcagaagtttctgaagtaccctcagccttgatggggatcctcgcaccacctcaaatcctgttctcagccctaagaactgtgttagtcatcctcttaagaggatgtgtgattttaaatcagataatgggataaaccacatttcgtctagactggtcaggcctttgtccagtcccctcctcgcccacactaccccagctccacagcgggcattggttcaggaattcaacccacactttataactggagacagtatctctccagttaaaaaggtcaccttggtgtccgcttctcaaggaacatggacatctttattaatcaaagcccaagctttgatctggagcctaatatcctgcactccagctctcatctctcccctcccccagtcacactttcatgcttcccagagccacccctacaggaagtggtcaagggaattctatacctcagggctgacctaaattaggatttcttggcttttaagataatggtaactttcttaagctaaaaaagccccaaaagaccctgtaagagcccttggaaacagcaccatgggtgtagcttccccccaggatgtaagcatgtatgcacacatctcgtatgtgtgtctttgtaacaaatgcctggatcttagtaccagggagacctgattcatagatttcatagagaaggagagaaagatggcccataacctgggtgatctgacagaatcacagtgccctcagctgagtgcccttcagaaattgattgacaactgtttagcttttgaaatctaaaagtagtacagcatctcagaaaaccaagatgacgcgagtccatgtgatctccttccacaggactgatctttcacaccgctcgttcctgcagccagaaaggaactctgggcagctggaggcgcaggagcctgtgcccatatggtcatccaaatggactggccagcgtaaatgaccccactgcagcagaaaacaaacacacgaggagcatgcagcgaattcagaaagaggtctttcagaaggaaaccgaaactgacttgctcacctggaacacctgatggtgaaaccaaacaaatacaaaatccttctccagaccccagaactagaaaccccgggccatcccactagcagctttggcctccatattgctctcatttcaagcagatctgcttttctgcatgtttgtctgtgtgtctgcgttgtgtgtgattttcatggaaaaataaaatgcaaatgcactcatcacaaacta

SEQ ID NO: 2 - DNA, 84348 bp, Homo sapiens
  source 1..84348: mol_type = genomic DNA; note = ABCC8_gene
agaggcgcggcaggcgcgcggagccagcggagccagctgagcccgagcccagcccgcgcccgcgccgccatgcccctggccttctgcggcagcgagaaccactcggccgcctaccgggtggaccagggggtcctcaacaacggctgctttgtggacgcgctcaacgtggtgccgcacgtcttcctactcttcatcaccttccccatcctcttcattggtgagtgcgcgcagcgagccgcggaggaggggacgggagagcagggagggaggaggaggcgctgcgcgccgcaccgctcggcgtccccttccggcccgcgaccgccgtccgcctcgttcccggggtcccctgccctgtgtcctgcccgccggtccccgcactcgcacaccagctcatcccttcactcccccggtgcccccgatcccgcgccaaacacagcggacgtttgtgacccatgggatcaccaagttttgcttctgcagggccaagagctgggatggggaaaagggaaagaggaggtctcagcacgcagtgggaaactggagaggggtcgggcctcaccctccgtggcgcagcttagggagccgggtcacccctcccgcaaggcagcctccctgtcagccgcagctgggcctagggaagagggaagcctgtgctttggagtctgggatggaggcccagctaacccctatgctttcaccgggctgagccgcgcagtggtccgtgatctctgacagtcccaggcccgcgccctgggcgaggagaggcgagagctagggacttggattcccttcccccgccaccccacccgggcatgtgtctccagagcgcaacttctcaggctctgcgcaaagtagctccgactcgccgacgcagcgaccccggcgcccttgcttgcaaagttgggcgccacggccgggacaatcgtgcgtgcctctccactgaggtcccccccatctctctccaagaccttgactcttccagaccagtcaagtctatcaactcatagggtgtcccctgcatccccaaaacgtgttcattcactttaagaaaacaagcaaatcttaaaattcatatacagctttggggaagaaaggaaagattgtcacaaaattagatttacaagaggttgctgcagaagcagagttgctagttattaacaaagacagttagatagaaatagaaataaaacatacaaaatatgtgctcatatgtgcatcaaaaatcaaaaaagaacagcatttacacttctgttctcagccaaacggtttattaacctgatgacttgtcacacaagaagttagtatgtataatggggtaccttggcagggcacagtggcttacatctgtaatctcagcattttggtgggctgtgacaggaagactgcttgagtccaggagttcgagaccagcctgggcaacatagtgagaccccccccgccctttctacaaaaaattaaaaattagctgagcatggtgatgtgcgcctgtagtcccagctactcaggaggctgaggcgggaggatcacttgagcctaggagatcaaggctgtagtgagccgtgatcgtggcactgcactccagcagaggcaacagagcaagaccctgtctcagtaaaaaggtgtggtgggggaggtaccagcataggaccaggctgaatgagttggacgtttagtttgtgtgtaccagccttggggatcctcatgtgtaggtgtcaccctcaccatggacccaatgcccaagcacctttctggggttcatgcaccctcttcctcctccaagtgggcaggcatcctgcctctgactgtctctccctgcaggatggggaagtcagagctccaaggtgcacatccaccacagcacatggcttcatttccctgggcacaacctgcggtggatcctgaccttcatgctgctcttcgtcctggtgtgtgagattgcagagggcatcctgtctgatgggtgagtgactgtctgaggactcaggaaagtgaatctgctccagggtacttcctgaaaggcccaaggagatcctagctcacctatattccacaagcccatgtcttttgttactacatccagcagctcagtgtcttctatgtgccaacctctctgagctgggcactggacgcaagtgagtcccaggccctgccatcagtccaggagagcagagggaacacggacctgcatgccaagtcccagtgaaataatgctagagcctattagaatgccacaactccagtgaaaaatgtctggcctcttctacaacctgccggagttaccttcttggaaaaaaaaaaaaatctaaccatgccacccactcttgcataagacctttccttggttctcagctgttttgaagatgtggtctcagatcctcagcccaccattcaaggtcttcacagtcagccccacctatctctggcctcattccccatgcccaccttccgtttgggcctcacagcacactcctcacacctctgctacagcacagatcacactgtatgttaaagtttatgtctatttgcaaaactgtcttcagagtcagaaaggcctaagagttagaatctgagtcttgttcatctttgtgttcacagtgcaaggcatgtgataaacataaacattattcagtccataaacatttattgggtccttaggagaatgaatgaaaccatgttacaaataagtactctgggaggtgagaggaaggcagaattgggcaagctccatggttgagagggctttggagcggagtctggaagggtgactaggcttcagacacacagaggaggaaggagagagagaactggtggtgcctgagggaagggaaaaggcaccaaagagaaaagcaggtagggctagggagcagcgcaggggctggagcattaaacacaggctggggagcgatggaggctgaggctgggaacccaggttggggcatctcaggaggactgtgaatcccagcctgcatgtttgggtcggatttggtcagcagtttggaacagaagagagatgtcatcagcataacacttttaggtgggaacctgaggtgttcagcgcaggctggaggcagggagaatctagaggtataatagaagcaggacttagcattgactgcagtagtctaggtgagcaataactgcagacagaaatggtgtgtcagcagtcagggacagaagaggagcgggagcagccatctcactaaggaagaatccagtaaccagcaaggatgagagactgccaggagagggagtggtggaggagagggatatttggcttgagtatctgaggtccagcgccccctgagctggaatcagattatacccagactgcactcctgcagtgctgcctggctcctgtagttggatggcaggggataggctccctcatcctccctcccgttccccaccttcccttccccaatgtccctgcatcctggcttcagcagtgatctctaaaatacctgcttgacttggaggcagcagctctgcctgcttattaaagtccctagaccagcaagaagaccagaaggcatactgctacacaagcacgtgacaagtccgcctccacccccacccctacaccccttccaaagtagcacaaatgccacagtgagccctcagatgggaaatactcaccagatggtgacagagaaagacacctccgcccttggagaaggaagacctgggtcttcagtgagcactgctgctgtgtaccagctatgggactttgcacaagtcattcaggctttctgggcctcataagcatttataaacatacgataaaacattttagttgccaacttaaaaatgtgtgagaaagtataaggtgtttcaaaattatttcaaggagtaaagaggcaagagttttgaagatccctgggcagggtgttggctgttcccagtgtggccattcatgactgctctctggccttatgaaacaagcatcatagtccctggcttgcctgcttcatggggctgtggagggtgaaattcgagcatggacagggtgcagagcccggagtggcagagcactgggtagactgtgtattcccagaatgtgggaaactggaatgaatcggtccagggatgccctcctgctggctgtcagcagcccctcctgtgtgtggctgtactgcttcagctcagtgcaaagggccatctcctccccagggcacagatcagctcaagctgagtaattgtcatctggtctttgtgagctcctacccccaggcctgagtgaggggcaggaaaagagcagacaggagaagtcacagacccttgtgatacctccagtctaatccagcctgggttttcagagctgtctggaaatttagggggcaggtgggagggggctgattaaggcagccctgatttgatttagagtgagcctcatttagtgactaattaagccatcttaaacctgtagggcttcccctcttcctttgggtattatttctttctgtgatgttctgaattcagaacaatcaaaacagtataagttagtgaagaagatattttttaataactacaatattttcccagaccaccatacactggataaagcctgtatataaaactttacctaatttcttaactaattgaatgtgtattatttaacaaagcagctaaaaactattctatgaagccatgtcatgaaatatttagttcaattatggttaatcctcatcttatttcgtcttataaaattttaacatttctacctcctattgcaaaaaaaagcatttatatcagcatataataaaacatgtctagatgtcagcttaaaaatgtgtgagagagtagagggtgtttcaaaattatttcaaggagtaaagaggcaagagttttgaagatccccaggaagggtgttggctgtgcccagtgttgccattcatgactgctctctggccttgtctgtcttgtaccttctatattagtttgaagaccttttttggagaatattcactaaagaatatcaatatctaccatttcattaaaaaagaaatgtggagtttgccttttcaagttggtttgatgcttattgatgttttcagggacccagcctcttcccatctttccataccatcctgtgtgtgtgtgtcagcctatcttccccatggtcacaaggtggctgcctagctccgggtattgcttagcatgagcagagagggcatgctgccgacatgcctctcctttatgacagagatcattctttctttgacatctcactggccagaatacgtggaccaacactggcaaaggagtatggaattgcatggctgcttaaaccaatcaccatccattccctggggctgggtatattgctgctggagcaaacctgtggtcctcctggcacagaataaggggaagatactctttggtggacagcccacattgcctctacacttgcacctcagtcccaccagacccactgaggtcacaggatagctctcctcatgtccttcctccttctctgttgaactcttatgtatccttcaaagtccagcctggtgccacctcctctgggaagctgtccttggttgcccaccccctcctttgtgctctctcagtctctgtccatcggcagtatcacttccctagcctgctgactccaacagttagctctgagcatggcagccccctccataccatcagcttctcaagggcagggacccttggcacactggatagaagtagcctggtgggcaacagcagcactgaggcagcaagctgtagcaggccatctgggaatggagtgggtaccacagggctggagcagaaagggcaggctgggcagatctgataaagtggctggaggccacatagcctgggcctttcgttccaggctgagcagagtgggttttgctgtctgcaggagggagctgtggaagggcatgatcacgaccaactaaggtgaccctcctcaccaggcccagggaagactgaggcctggaaggaggctctggctgcctctgggtcttacccccaggccacagtccacccacttagaggcctctgtgagttaaggtggagagactatgagctggtattgactgctccattccccatcccgagagaggagacaaaatcagtgaccttggaaatgcctcttcgtgcctcagtttcctcaccccataaaatgggagactaagagtacccactcgatggggtttaatgaagattaaatgggttaacatatatcgcatgcttagaacagtgcctggcacagagtaaatgctccataaatactgactctcatcagtttgttatcacagcctctggggagggcgccagtgctgacttatgctgttcgtgttaaatggggctgtcactgggtgagttgtggcatacaggcccctgcactgttcaagagaccccagcaacccttgtgcttagggctcagcacatagtaaggcctccagatcatatacccagctctactccatgtactggcagctctgcccagcccataccccaaatacgcccattaactaaagggccctgcagcctataaagtgatgctataaaggttcagtgttcagcctttgaaattcaaggcctgggctgctctattgcagtacttagcatgtccccatcctgtctgtttctctctcccatctcagggtgaccgaatcccaccatctgcacctgtacatgccagccgggatggcgttcatggctgctgtcacctccgtggtctactatcacaacatcgagacttccaacttccccaagctgctaattggtaggtgaggtgtaggagggaggggcagtaccttcattcatttcttcagataatgtttactgaggactcattatgtgccagctattgctctaaacagtagagatttggaatagaaaaagaaaaaaatccctgccttcatggagcttacagtctggtgaaggaggatagacaggcaaagacagtgaataaacaagcaaacaaataggtggtggggatgctatgaagaaaatcaagctgagtaaggggtaggggcaatgacaatgttgctatctacacaggatggtcagggaagggctgtggtaactgtgggcatgcagatatttgggggaaggtattccctgcaaggggagtgacaagtgcaaagtcctctgatagggatagatttggcaaagatgtcactgtgggcaaagccaaatgagcaaggggaagagtgggaggtgagggcaggcgtcaggagaggagcgagcaagagtcccaggctctgggcctgagagcctgggtgaactgtggcatcaataactgatgtgacagaggagggggaggtgggctgtggtggggataaagttttctactgggggcatatcgagtttgagatgtcacagagacagccaactcaagtgtcaagttgggctttcatggggaggtcaggacaggagctacactttcaggaggtgggccttgtagatgacatctaaagcttgagcctggggctggctgccgtggctcacacctgtaaccccagcactttgggaggccgaggtgggcggatcacccgaggtcaggagtttgagaccagcctgaccaacatggagaaacccccacctctactaaaaatagaaaaattagctgggcatggtggcacgcatcggtggtcccaggtactcaggaggctgaggcagtcaaatctcttgaacccaggaggtggagattgtagtgagctgagatcgcgccactgcagtccagcctgggtgacagagcaagactccatctagaaggaaggaaggaaggaaggaaggagggagggagggaagggagggagggaggagggagggagaagaaagcttgagcctggatgaggtcacctggggagagaagagaaaggctctgggaccagagcttgaggtttgctaacatttagagagactcgggaaggactgcccacttagagcttctgagatgttaaatactgcaggactggggtcccaggcagaagcaacaggatgatggttggtgtttactgagcatgtgccatggggcaggctccatgccatgttccttacattcattgtcccacaggctaattcccccagcctccttattggtattgttaatatccccattttccagtgtggaccctgaaactgagaggttaaaaataataacagtaaatactcactttgtacttactgtatgccaggccccatcctacctatgtgatatattaattcatttaatccttgcaacaactctatgaggtaggtaccattattattttccctttacatatcagaaaactgaggctcagaggttaaataactggcactagtctagctcgtcaaggggcacagccgggagtctagcatctgtgcaatctcctaatcatttctgagactgcgtgtctaagggccctcagacttcgtccttggggtaaaggtatcaatccgcaggtctgcctctgtgttggggttcagcctgtgtgtctaaggctggggctgtacatctggcagttagactttgttcacactatgtccttaagtcagactgatttttaggtatcacagcatcgaattgacatttggagtctggcacactctgtgctaagccagtgacatcatggtgttgtcagggagtacagggtgtttcttgcactagtcacaggtctgcctttctgtagaaggtgggatctgagctccattaggattatccaggtgatccccctacccctagcccaggggcccccacatgagtatgaatgggagctgggggaagcaggttgagaggggagatgttaaatacaggcttcagagagccaccctgcttccatttctgaagtagctccttgtctgtagagaacccttcattaaccagggcctggctgaccagtgtcctctggaaacaccctgtctggacatctgaggagttcattttctcattctccagcaaacacataatgttctctctttaaagcacaagttatcacccgtggatggatttgtccttttctaaggaacaaagactaactccctccattccccttgttggagttatctccccttgaaaggacactccacagagccagaaattctagaacagggaaaagtggaggggacgtgcctgtgaactgcagggacagaaggaaatgggtattgggagaatggccagccctccaaggggctgatgtctggcctgggtatggagtcccacagaaaggggacctgtgatgcagcttacattgtcccgtgagggaaccatgatcctggaacccagatgaggccaaggaaatgttctctgaaaaagtcatatttgagctgagaactgaaggaactaactgggagaagggaggaaagagtgcttcaggcagaggaaacagcatgtgcaaaggccccaaggcagaaggaacaaaacacattagaaaattcagaagaagaagagtggcgtgggtgcaaagtggaggggagctggactttgggttttgtttgcttgtgcccaggctggagtgcagtggcaccaccttgggtcactacaacctccgcttcctgggttcaagcggattcttgtgcctcagcctgctgagtagctgggaatacaggcgtgtaccaccacactcagataattttttgtatttttagaagagttgggatttcaccctgttgaccatgctggtcttgaactcctggccttaagtgatcaggtctcaacttcccaaagtgttgggattacagccgtgagccaccgcacccacctggaaggtcataccacagatgtttgcctttatcccaacagcaatgggaagttgtgtgtgtgtgtgtgtgtgtgtgtgtgtgtgtgtgtgtgtgtggtttaacatgtttaacataaaatttatcatcttaactgtttttaagtatagtgttctgtggcattaagtatattcacagccgggcatggtggctcatgcctgtaatcccagcaccttggcaggccaaggcaggtgaattgcttgagctcagaagttcgagaccagcctggccaacatgccaaaaccccgtctctacaaaaaacataaaaattagctgggcgtggtaatgtacacctgtagttccagctacttgggaggctgaggtgggagtatcatgggaggctgaggagagaggatcagttgagcctggaaagtggaggctacagtgagccaagattgtgccactgcactccagccaagattgtgccactgcactccagcctggacaacagagtgagaccctgtctcaaaaaaagaaaaaaaaagtatattcacagtgctgtgtagccatcaccactatccatctccagaactttttcatcttcccaggttgaaactctgtactcattaaatgataactccccatttctccctccttacagcccctgacgaccaccattctactttctatctatgaatttgagcactctaggtacctcatctaagcggcatcatgcactgtctttttttttttttttttttttgagatggagtcttgctctgttgcccaggttggagtgcagtggtgcaatctcggctcaccgcaacctctgcttctctggttcaagcgattctcctgcctcagcctcctgagtaactgggactataggtacctgccaccacgcctggctaatttttgtatttttagtagagacggggtttcaccatattggctaggctggtctcaaactcctgatcttgtgatctgcccacctcggcctcccaaagtgctcggattacaggcgagagccaccttgcctggcctatttgtctttttatgacttgcttatttcactgagcataatgtcctcaaggttcatccatgttgtagcatgtattgaaatttccttcctttttaaggctaatattctactgtatggatatgccacattttgtttatctattcgtctgtcagtgggttgcttccacctcttgactcttgtaaatagcactgctatgaacatgggtgcattgaggggttttcgacataatcataataattgctttatggagaccagcttggaggagaacaagatggggaggaagtgtggaaaccaatgagaaggctctcagggtatagcgggaatacagaggacgcatgatgatgcctggacttaggtggtaccacagggatggagagaagtagatagagtcaagctatttaggacgtgaaatagacagcatttgttaatgggagaggtgtggggcgagggagaagaatagagggagaaggaggagtaatgggagctcaccagcagcccccatgttatgcctctttccttccttttccctcttctctcatcaggcattcagcttttgctgagtacttctgtgtctgacaacaggctgagcactcagcactgcaggacaggactatgcaaaaaacctctgggcctagtcctgggtgcactgctaattccctgtgtgaccttgcacaagacatccaagctctctgagcctcggattccccacctgggcaggaagagtaagtccctgcctaagtcatagggttgtaatgaagagcaaagcagaccatatctgttaagtgttagggacaagacaagcatgaggcatattttcaagtctcggctcctgtaggcagctctcactaagggctaaagggcttctgatgcctgggatagaatctgtccggcagagtggagtggaggcagggggacagccttcagctgtggaattcctccagtcctagagaccagcctgagctgggggacattattccagtcctgaggcatgagagcagaaggccgatgcttctgccctccatcctaatgtcctcctgcagggacccaaggtggatggcatcgatccccccgggtgagctcagccctgggcgcatggtggggcccaacatctcaacctgtttcctaaccctgagccaggcaggacagatcccagatttgtgcccaagagatgctctggcatccatgcccaggcccacatagggatagagggcagggtgaaagtctctctccctcactcgggtcctctggagaggggctctgtgtcatgaagctgaccttatccgcatctggtctaggagggaggagggaaggagctgccagtgctaaaatctcccccaccctcaaagggggacttcacaggttattgctggttttggttgttggaagctgacagtgatttattggcagattgaagtgagtgtgtgtgcgagaatttaggatagaatctactgatagcttctgaggtttaccttccccaggtcttaaatctggagataataaaaatataacagctaatgtccaaagagcacccgctgcgtgtgaggctcactgcactaaatgctttccatatgtttctcacaagaaccttctaggtagcactattatgattcccacttaatggatgaggaaactaagctctagaaggctaagtgactaatccaaggtcacacagctattatgtcacaggctctgagcccaggtgtatctggctgcggagccaccaccactaacccctgtataacgctgcctcacagaactgtggctggctctttccgtatcccccatgcccctgctccatcatcatgctgtggtgggctctgaactgtgaggacagggatccaggctttcaccctctctctgtccctagctgccagtgcacttgggcaaggtcacatcctatttctgggcctcagtttcctcatctgtaaaatgaaaggctggattgaatgacctttaagatttccctcacttggaaattccacaagtaagtcattatagcatggagcttgcatgcatgggctccagcgtcaggccagcccagctctgccagttaatgggtgtgtggccttggatctgttacctaacctttctgagcctcatttcctttgtctgagaaattgggggtgacggcagtgtactttctttgaaaagttatggtgaggaatagataagatcatgtgtttaaagtgcttacttggcacagtgcctgtaacttagttaaattcaataaataaatttcccattcttcccatgatcatttatttttaagggacatttgtctgaccagtttgatttatgagattattggtgtttttcatgaatgttaagacgtacgtgcgtcatcttagagtcatgtactctgatatattcacacgtgcacatccacttactcggaaatgtacacacccaggcacgcttattctgtctccttctctgccacatacttgcacacattatgtgagtgtacacacatgatgcacacacgtctctgcgatcttccatctctcctcggcagccctgctggtgtattggaccctggccttcatcaccaagaccatcaagtttgtcaagttcttggaccacgccatcggcttctcgcagctacgcttctgcctcacagggctgctggtgatcctctatgggatgctgctcctcgtggaggtcaatgtcatcagggtgagggtaagcaggccacctgggccagggtggggtgggaagcagaggctctggcctctgtcctgccctgggttcaggcccccaccctgcttctcagccaaactgagaagggatcagcttgttttacccgcccgtgtaaaggggagtggggccgtggcggaaatttcaggatagacactgcatctggcccacgtgtgctctaccccagggtcccagagggagaggggggtgatgggtgtgttcgctgaggttggcggatgactttccgtagaaagggaagataagcatcaggcactggcctctcctactttctttcttcgggggtgggggactttgctttaatgtattcatatcgtcacgctggtaaatgaatgagtaagtgttttgttttcctttctgtttgctcccgcctccctctctcttcctcaccccagactccaaccttccccttcccctgcccctacctccccaggcagcccagactaatgaactcgtttgtctttcccatgctttgtttttattagtataataccatatgtgtctgtctaaataaatacctattcaggttttttcctctcaacacaagtgaatatgtaggtttcccccacggtatttatcttgtaagaatgggatcatattatgcagttttctgcactgtgcttttctcacccaacaaatatctcttgggactccctccaagccatctgatatggctaattccgttttcttaatggctgcataatattccatcgtatggatgagccataatgtgttcagctatttctctatggatgggcatttactttgttgccaagttcttgccttcatgaataatggtgtgttgaacatacttatatatttatgtattgctgcttttatttctatgggagagagtccaaggaatggcgttgctgggtcaaagggtctgtgtattttaaattttgatcagtgttacatattgccttccagaaagactgtaatctgccagcaatgagtgagaaaaccctttccctgccttccaaccagcagtgagggctacagccctttcgaacttggactgcctgcatttctctgactcttctgcttttagttggtgatctgcagggcacaaagctccttatgtgtccccccatccagtgaccctcacaggaaccctgtgatgcaagcaccatcccctttatagatgaggaaacattttagatgaggcttgtccaaaaacaccttgctagtaagtggaggaggcaggattcaaaaccaggtctgcatgacttggagttctgtgaactgtatatgaaacatggtggtatccttagatctgtggagaagatagcatatgagagattcctgctcctccccaacccaacctaaacccaacccagcctagccatggggggttcaaagtcgacctcaatgagcagttacaaagtcaggatgccctgacattggtggccaagaagtgttggggaatccttttcctggtaataattacaggcgaaagatggccccatctgttagagatcaagtgtggaatatcacaaccccagatccttgctggggcaaggtagggagtggtgagaagttggacttacccatcccccatggcccatgtgccccacagagatacatcttcttcaagacaccgagggaggtgaagcctcccgaggacctgcaagacctgggggtacgcttcctgcagcccttcgtgaatctgctgtccaaaggcacctactggtggatgaacgccttcatcaagactgcccacaagaagcccatcgacttgcgagccatcgggaagctgcccatcgccatgagggccctcaccaactaccaacggctctgcgaggcctttgacgcccaggtggtcagtgggggcacagccacaccatctattcactgccttctggtttagggtcacagagagggacctcaaagggcattaggtcaaaatcctggtgggacaagaggggaaactgaggctggtgaggggaagaagcttgccttaagtcacacagtgaaccagggacaggtgcagggctgaggattcataggacaggcacagttggaatggcccttaccgtttaggtcgtctagtccaaagtccttatccagatggggaaactgaggctctgagaagggaagtgaccccactggactctcacatccctgtgctctttcctctgcagcttactgactataaaggttggagtgttcacttgatttggagcaggggtgttagtggcctgatccttatggtaactctatgagttgagccagacaggaatctccccatatcactgaggagcaaattgaggccctgagaaaggctgtgacctgcccagagctggccacagctggcaggcggcagaggcagtctcctggctcccagtccagtgctccttcacttcctctgccctcgcaccagggcagttgctgaggcagacacggtggcaggtggtaatgagtgagtgtggcacatggccacctcctcattccagtgctgtgctcatcacatagtccctgaccagctgtgtgaccttgagcaatcatctggccttagtttccccatctagaccatgttggtgttgatagggccctcccaactgtgcacttgctgattccatgatctcttcctggagttcacctatttgcagaggatgtgaccactgggtttccccagacaacaggagctaggggcatcctgggaggctaggcccagccgtgaattagccctcaggcactctgacctggccatggtctctctgggcagcggaaggacattcagggcactcaaggtgcccgggccatctggcaggcactcagccatgccttcgggaggcgcctggtcctcagcagcactttccgcatcttggccgacctgctgggcttcgccgggccactgtgcatctttgggatcgtggaccaccttgggaaggagaacgacgtcttccagcccaaggtaggcagccccaggggtagggtaaggcaccctctagatggttttcagttgtttctgagagtgcaacaggccaatgtgtgtgagccatggccacactggagtggctcctcacacatgcgcaaagcccatagcagtatccccaccacagaatactctacatctggtcaacagaaatgccagagggcgagcctatgccccaagggtatcctactctcctctcaccgtcactaccatagtacctctcccggtagttaggtcagtccgaaaactgcaggaagtgcttttgtttgtccagtgtctagagcttctgtgacttggatttgttggctttcagttcatgtcatcttagtaaactctttaaaagttttcaagatctgtcttcttcagtcctgtaaaggctggcacttgagctttctgcaggggcatcttgggagctactgtcagaggagagagaagtgggaaaccctcacgagtggagctttgtctctccccactccaaatttcattcaaagctgcccgtagttttattaatatgttggacttttccattaaaatttcttttttaagaaaagtttccatggcttaaaaaacactggagacttattagactagattatatccaatggccttggcagttgtaacgattctgcaaactgaaatttgttggagctagaaaacctttccccggggttatttgccctgcgtggggccgtagcatccacttcgggggctgggcagactgtgctctgttgtctgtttccttgcagccgtttaggtttaaatggccacaaaatgaaaactttttcacccctaataagtttcagagttttagtttccaagtgaggatgtcattataacattttaaccacagacagtctgaaaataatgcagagaatggggaattagggtttttaataatttatgacaccctttgcgtaacatttgttcatctcatgagctccaaaatcgcagccagcagttaatcctcaggaggtttatgttcatttttctggagacataattagtcagctgaacagttttggccacagatatgagatacgttgagtctgatttatgcagcaaactttcattgaacactgctgtgtgccaggcctgggttgggctgtgggaatatgaaagcaatagttatgatgaggatgattaacaatattaacagccacttactgaccacataatacatacctggctgtgtgcaggagttatccatgtgttatttaatccctaaaactatcctttggcgtgagtatattttgcaacatctttactgtggtatacctcaaatactgtacagtttatgagatgataggtattcttatccccattttacagatgagaaagttgaggctcagaaagtttaagtaattttccccagggtctctcagctagttaataacagaggcagaatttgaacacaagactcactccacagtctgggcatttacagccaggaagctaaattgactattattatcaagccatcacctctggctccaaggattatgaaatccaacagtgaggagagaaatcaaaataaaatacttttatgctatgtgttacatgtgactcttaggaggaatattcagggaattgtgggaaaagatagtgattaacttagccagtggtcatgaacagcttcatagaggaggggatgtttgaaaggggtcttgacggatgagtaggaatttgccaggctgccatgggaagatttcttgctcaaccaagaatgcaaggaccacttttgcttatttaaactttgatggcttttgaagccatatctggctttttgagcctctctactttacctggcccataaaagagaggggaagcggctgcttctcttgtctacaggagtgtcacctttggctctagcctgaccataggctaccccagaatacccccattggcgatcctgaagcagcatggagccagttgttaatatcagggggaaatggcacaggccagagcccttatcagagtgtccacaccacgctcttcttcctgtgtttcccaaaacccttgtgggattctgctaaggagagagctctgaggcaggacgtgccaaagagatggcgaaagcacttagaattttagttcatctgaacgttatcattgccgtttttttctctttgtttatacacaaaccctggggtttattaccgtctcattggaatgctcttgtcccagttacttagcacacaaatccctgagacagatggccctgcctcagtggcagtgggccttatcagatttaatattttttccctgcagcccaaacacaatcagaaaatttccgacacagaaacaagagttgaaagtaaatatagtctccagtgtccgcaacaaagaactctccatcatgtggttgcctgggatgtggcttaattctcatgtgggcttctgagctcagaaaatgggggaaagggatcatttactgagatcatttggttcatctcccagcccccaagccattctaatccagagagaaccgagtgctattctggtctttatgaatgacaaagaaggaagctccctagctacatgttgcagtgtttcacagtctgggagaggaagccgttttttctgcccagcctgaatccatcctgcagcagttggcacagcgaggcacctgtggtttattcatcatcactcttccttcctaagatactcagagttggcaagaaacatgtcatccttggtatccgcaaggacgaacatttctgatgtcctctttagttactgaaagtgtctgtgacttgccagatctttgatgctcctgtcaccccgctgccactccccagggaaagctgggacccaggttgggctctgcctatgatctatagctctttccagcctcctctccaacccaacccctactcccaatctgtcacctcccatggatgccactgatctggctgaaggacaagagaattagattcataatgagctgctggtgtctgaaacctgccagcactgccctgggctatcagttgagccaaaggaagaaggaacagtctgggtttgatcgaagggctaaagcttcaaacagcctctaagtctcagtaggaaaatgtgtaggtttgggagggtgtatgtgtttccgaatgagttcccctaagaactgcttatggttctatatgtgtgttctgtttgtccctgtgtcttttggtgtgtctttttctgcgtgtgtgtgtgcatgtgtgtgtgtctatgcccccgtttggattgccatatttgtggctatcattatgagtgacttaatgagtgtatatgcattggtgtttctgtgactttgtggttttgatgcatgggctggcctcttcataaccatgtccatgcagctggtctggcctagagtacctgccttcaattcactagctccttcttggccatcaagactctgctcaaatgtcacctgctccagggagccttcacctggttgaattagatgccccttatctgtgctcacataacatcctatcaaagcgccctgtttctttccctgacttgatcctctgtcccctattgcctgacctctgtgtgcccagcactcagcccactgcctgacacccaggagatgcacgggaaatggttctgcaaagaaggaataatgcagcaattactatatattgagtgcttacacttactgttttttcacatgcactgttacattgacttctcataacaactctctgaagtcccttcatagcctcaccttacagatgaggaaactgaagctaagagaggttgaggaacttacctaaggacacagtggctaatatatgatgagtcaggacctctaagtccaggctcttaaccaccgtgtcaaacagtcttgtatgaatgggtaggtgtgttggtctctgggtggccaaagataattttattctttacccagggcctcccggggctgggacctacggacaactcaccttttgacacctgccaaaataggaaacaagagtccaagtgatcccctctcctttaagcaccagagaacatgtgaaggggacctttccaatcatacctctggcctggcagagacaatggggctccaaactgtagagtcgggagtgctgggttttagtcctacctctgcagctaactcatttattctcctcagcagtcacattctgcaagcctcaaatgcaaaatgtgtaataacttctgtagaaagtacatgggggcatgaagatcattggcttgattgcttttaaaaaatcggtattgagcactactggggaaatccctggaaacaaacacaattcttccctgagagcttgtgaaaatgcaagactagggcctatgattttccaaagcattttcttccaccaagtgtcaggttgtaggtccttggtcttttctctcttgccttggtacctgcagggtgctgaccagtgctatcatatcccctccccgtttcctaggaccctcttctcggtagactccaacagggcctgccttccttgggcagcatggcaggcctcttggctagtctagtacccacttcttttttttttttttttttttttggatggagcctcactctgtctcccaggctggagtgcactggcgcaatcttagctcactgcaacctctgcctcctgggttcaagcaattctcctggcccagcctcccaagtagctgggattacaggcatgcatcaccatgtccagctatttttttgtatttttagtagaaacagggtttcagcatgttggccaggctggtctcaaactcccgacctcaggtgatctgcctacttcagcctcccaaaatgctggaattacaggcatgacccaccacgcctagtcaggtacccacttcttaactgaaacttagctattccaggttctatcccttttaaaccaactctttgaagagaggtctaataatgacccaatgacttatagctgcagtgagatttttattttaacaggtcacaaaattctcaatccacaaaagtagatttctgaccctaggttattttgttgggggcggagagaggaagtcaaaggttttgcagcctttagagctgcaaaaccagaatttgttgttttgttaaaaatgcacaaataccgacgagtatatttaagtaacacccatagtctaacgaacaaacatgatcagttggcttttccagccctcattctccagcctgtgtgttttctgctcattgtaacacagcgtgtgtgtggcattccatgtttctccagagctttcatgagaatcagtggtcttggatgcatagtgttcccatgagtaccttaattacctaaccattccctgtggttggaaatttatatgggtttttgcattctccttctgctctgaccccaaaataaatgtctgtgttcatacagctattaccttatgtgaaattattttctttgggataaattctcatgatgtgttgttgctttaaaatagtggactccagtctccagagctgcgtctctgcagaggacagtgggacagaagaatcccagggcatgttaaaaaggaccgggtcttcctaaacccacatgcctatatttctgacccagtaccagccaggggggcaagtttccatcccccacaagtcacaaacctgtaactgacactaggatgcttaaggtcaaaggcctggacgaggcctagacagtgggtctggggtagtgtttttgacatcactcaggttcatgttcacatgttgtccccttaccagcatgtgaccttgggccagccactaaccctactgaaactcctttttttcatgtatgaaatggggctaataatggtaccctcctcattagggtattgtgaggatagagttttgcacctgataaatattgtctcctgccccttcctcccctggaaattcaggtctctccctgcagcctaattttaaggcccatttttctgcttccagcccacccctgcccttctaccttcgacctcctccctctgcctctccctctggtgcactggcaaatgggacagagagcctcggtagggccttcctcttagagtcttgcacgcatccctcagtggtctccctgtggctgcttcctgctgccaccaacagatacagacccctgtcgcacagatcatggtagagacagtggtgagcaggaccagacagctccagggagcagtgagggctggcttagagaacctctgttaaactgagaggccaccatcaggaagctctgatccaagatccaggaatccctgactctagggaaaggcctccaatgagagcctgggccctctctgcctgattctgattgtggatgtgccctcaaactccttctcatcactttgttccatccctctttaccctgcagcagctcccacaccctgccaaacaggatgcacagtccagggcagtgtctgagaaagagcagagatctgtcttcatggaaatattgatgtggctctgctggggagcaatggatttatcaagatcaaagttttcctgggagttattgatgcttaatttggaaatagacacactgttgatccctggtatctttagcaacaaagttaaaatgtttgtttttcttcactggttgccatctgagatcttgccggaagtacacaagagaaccttaaatttaacaggaggccctgggagcccatgaggctggcgggcttgggtctgaaatcttttcagtctcttgtaagtgatgagctctcattctctcctgagagctctacggtgccatgttttccactggccttttctgctcagtaattgctacattacaggctgttggtaagttcggaacaagggagctgctgattccatttctgtagcagagaacatgcaccgtgagacttgttgtaccagttcaggttttaggtgctctatttattcttgccccattcagaatgctctcccctgggtctgtggccacaatgctaagagtcatatttatgggcctgcagttgtaattgggccccattctgttcccccaagtggaaagatgaacagggtgtaagcaaccttccctgtagttagaaaaacgtttagttggatttatcagtctgatttttcactcataaacaattgcacaagcctttgcaagcccagagggtcttgtaataatgatggccgtggtccattatggcacagtgatgtgttctacggtggtcattttgctggcaatgacagtcacctctgaacttctctttccaacagacacaatttctcggggtttactttgtctcatcccaagagttccttgccaatgcctacgtcttagctgtgcttctgttccttgccctcctactgcaaaggacatttctgcaagcatcctactatgtggccattgaaactggaattaacttgagaggagcaatacaggtacttggatgattattttttcactttgccataagaaccattattaggaataatgtccatgagtgttattcatcctcatggacactcaagaataattctgctgtaaatttattttttgttgcccattaacgatgttttaaaacagtaaccattgacaaggcagtgtgggatagtggaaaatatcttgggctgaacttgggagacagtgtagctctggctctggttctgccttggactgggtctgaaaatccagctgctcagcccttggcttgaaagtggtagacgtcactaattgatcacagcactctttctgaccaagggtaaatgcaaccttggaatcctctctaagtggctgttccagagttctgctaccagacagtcttctttgggtgtgaaaaaaggaatgtgcttgacatacaaggtctagatagcctctaagacagggtcccctctaagatggggtattggtccatggcctgttaggaactgagccacacatcaggaggtaagcagtgggagcaagcattactacctgagctctgcctcctgtcagatcagcggctacattagactctcataggagtgcgaaccctattgtgaactgtgcaggcaagggtctaggttgtgtgttccttatgagaatctaatgcctgatgatctgaagtggaacagtttcatcctgaaaccatccctctcccccaggtccatggaaaaattgtcttccacgaaaccagtccctggtgccaaaaaggttgaggaccactgctctaagttctatttgaacccttaagtcttgctcactaatgagagtgacctatttggtctgttgggtcacttaagtctaggctcttggtcctgccttctgtgatttccttcttagagtttctggaaagatgatcaaagccagggagtgttcagggcccctctgaagaaggtgatgatgagagttgtccaagtcccagggtcttcactaggattttggttcagctatcagactagagagacatcctgattgagagtagtttaaatgggatagaagtttgtttattcttcagatagagtcagggctgacacaggagctactcaatgatcagagacctggcttcttctgtcatgttgctctgccagccttcttttgtgacttttgtctccatagccatggtgggtattgaaactgccactatatttacatttaaactagccagaagaagggacaagaggagggaacgcattttccttttaaaatggtaatacctgatttgcacataccctctcgcatcccattggtgagaaagtggccaaatggccgtatctagagagtctagaaagagcttggtctttattcttgacagctatatatgcactgctagaaattctctgtgcaaagaggagaatgggcattgggaataactagatgcagctatgcctagtgatgtccatgaagttgtggtaaaatcctgaagctaccttgttctttggaaatgttcctcagaatcattaacattagtcatgtgggagacaggagaagaagctctgcagaaaagggaccgagaggacaaggatatagcttgggctggggacaatgtcagagtccaaactctggctatcttggaatagtctgtgtgaacggtgccctcccaagttgtgcagtgcacaacctgtgcagctatatatggcaaccctgcccatccccagtggtttctcactgggaaagcagagtatttcctcagggatgtcattatgtgacaatagtggaaaaagcccaggaaaatctaagaccttctaagactcatgggggcccagagctgggaggaaccaagctgttgctcagttcagaaaacttctctagaaatcccagcctctcctcacacccctccagtgacaggcagacttgcaccaccacaagcaacagccacttttgtggttgggcagttttgtaattaaatatactaatgtgtgtatgtcataaattacattttccaattatgccaaaagagccaaaaatggttttttaatggttagcatataatcgtttttatcaaattgcttgaatctttcatgttaataagagagattcattactatgccacaaaaagcaaatactggcattaattatagaaacaaattaggggggtggagcgcaatggctcatgactgtaatcccagcgctttgggaggctgaggcgggtggatcacaaggtcagaagtttgagaccagcctgaccaacatagtgaaaccccatctctactaaaaatacaaaaattagccaggcatgttggcgtgcacctgtagtcccagctactcaggaggctgaggcaggagaatcgcttgaacccagcaggtggaggttgcagtgagctgagatcgtgccactatactccagcttgggcgacagagtgagacttcatctcaaaaaaaaaaaaaaaaaaaaagtggctcatgcctgtaatcccagcactttgggaggccaaggcgggtggatcacaaggtcaggagatcgagaccatcctggctaacatggtgaaaccccgtctctactaaaaatacaaaaaaaaattagccaggcatggtggcgggtgcctgtagtcccagctactcgggaggctgaggcaggagaatggcgtgaacccaggaggaggagcttgcagtgagccgagatggcaccaccgcactccagcctgggcgacacagcaagactctgaaaaaaaaaaaaaggaaagaaagaaggaaaggaaaggaaagaaaggaaaggaaaggaaggaaagaaagaaagaaaggaaagagagagagagaaagaaagaaagaaagaaagaaagaaagaaagaaagaaagaaagaaagaaagaaagaaagaaagagaaagaaagaaagaaaaagaaaagaaaggagttagggagaaaaaaaccctttctttctttcttttggagatttccggaaaatgtacccttacggatgagagcctgtgtcttcatgggttagagaataaccacgctttgtgcataaaaagttattaagcacaattcctgaattatacataattactagctgtcagtcagttgtgcatttctgtgtatgctggtcttcacttaataagactttatttcacagatcacttggtgtccctacttcactgaaactaggtgattatcttttgaagtctcatttcacataacctaggaggtatatagatttctttaaaaatgtcattgccattattttaaaccttacccatggtatatataaacttacagaaagacagaataggttcattattttaaaccttgcccatggtgtatattagctcacagaaagacatagaataggttcctgccttaagaaaacctgacccacaaaaaagcctgggtttacacaaaagaggaattaagggcggggagcccaccttacaacagaatgaataatagaattttatccaagagcaggcatcctgaggacatttaagacccggatgcatttttccttgttcaagagcacacatccaaaaattgcagtctttctgcgagtcatgatcactctgcacataaagcgtttaggttcagagctcggggaggccattaccatggctgctctctgtctgccctgtgagggtccttggggtggctgcactctggggatggtgctggggctgactgactcacgcggtcgtgtaacacatcagaccttccaaagtcgaacccttgttttgtttcaaggctcaattatgacaggacttggtctcagagcagatcccctccctaggctggagaaggccactttaaaacagatggcctgccccacttcatcatttttatggctctgatctgtgttctccactggcctctggtaaatcaagaatacaagtggacatgaagatctgctttaaaaaataaagaacagaccgggtgcggtggctcatgcctgtaatctcagcatttggaggccgaggtggatggatctcctgaggtcaggagtttgagaccagcctggccaacatggcaaaaccccatctctgctaaaaatataaaaattagctgggcatggtaggcacgtgcctataattccagctactccggaggctgaggcatgagaattgcttgaacccggaaggtggaggctgcagtgagctgagatcatgccacttcactccagcctgggaagcagagcgagactctgtctctaaataaataagtaaatgaattaaattaaataaaaataaagaaccaattaagtcctgtctacaggaaaaggccttacttgctggagaagtagcttgctgtgctggagtagactagtaagttggaacggtgatacagtaccaccttacagagctgctctagggcaccatggggactgtctgagaagcccctggcacactgtaacaggtggcatctggtgtggtgatgatgatgagaatgatgatgaatgtgaaacactctgctctcatttctagaccaagatttacaataaaattatgcacctgtccacctccaacctgtccatgggagaaatgactgctggacagatctgtaatctggttgccatcgacaccaatcagctcatgtggtttttcttcttgtgcccaaacctctgggctatgccagtacaggtactagatgggctgaggggaagggaggggggcagcaggacacacaaccagaatctgctggtccatggccagtaactaggagcacaccgtcttccactccatgcttgcctgtacctttcacacacttggctataccacaggctgtacctctgggtccctcctgtcccatactctgcaagcactgaccatctctcttaatgaccagagaaggcagtatcattaagactttaaaaatggagccaactttataaactatagaaaaatcaagccaggttcaggggctcacacctgtaatcccagcactttgggaggctgaggcaggaagattacatgagcacaggagttcaagactggcctgggcaacacagtgagaccccttctatgcagaaaaaaaaaagaagaaagaaaagaaaaatcgtacatggaatgcccacagatcttaaaagctatgttgtagcaaaatatttaattacatcaaaaagtgttagtgatgtatttttaagcaaaaagagtaagttacaaatagtatatgttgtatgcttactactaaactggaatatatgttatgtatacatttgtacagattcacacatgaaaaagaattggaaaatcacatagtgggattataagtgatttttattttctttatgtgtttctaaattctctaataagcgtgtataagatttggaaatcaacaacatgatacttttagcctaggcaacaaagtgagaccctgtctgtacaaaaaattagctggaagtggtggctcacaactatagccccagctactcagaggctgaggtgggaagattacctaaagtccaggaggcagaggttgcagtgagctacaatcacaccactgcactccagcctgggcgatagagtgacaccttgtctcaaaaacaaacaaaacctggtgttttttagccagatgtggtggtgcgcccctttagtcccagctacctgggagtctgagatggaaggattgcttgaccccaggagttcaaggctgcagtgagcaatgatcacgcccctgcacttcagcctggacaacagagagactcctgtctcttaaaaaataaaaataaaaacgttaaaacatggtatttttttaaagcaagacaacctttggtgctggctcaggaagaggtacattaccccccaataatcagaggagaatcgtcagcatgattgatctgacctcgggcttcatgtgtcccatctcccacccggagctcttccaccacagagtctgatcctgtcctatgcctgggactaaatcttcaccctggtgttcaggccagaaaccgaaatcccagacccattcccagagggcgggaaggttccaccgggagagcttgatgtagcagaaagtgacttgggtgagacaggctgattcaaatacttaacctctctgagccttggtttctttatctatgaaatggggaggctgcccaccctctggagttgctatggcaattcagttagataatgtaagtaacacagcaggcagagtggcccccagagtcttcacttcgtaaatatcagatccctctaccttgcacatgtttggtatgagtgaggtgttaccaatccagaatccattgcttcttgggataaagattccataaaccttcatctccagtgatttgtattggtcctccttacttgtaaagcttagagtttaaaaatattaaaagaaaaaaaggggagaggctcccacagggacacagctagacaagatgagatgcagggaatctgatgttcttttttatgggaacagtcatatatgccatcccccattaccacctacccatgcccagactgcccccgctccattctgccaagacagatcaatgactataaaagctacaaaagggcctggagatctcatctagtttagttaccaaccaaccttttatgcacaagactttctaagctgggtgtggtggctcatgcctgtagtctcagccactcaaaaggctgaggtaggaggatggcttgagcccaagagttcgagtccagcctgggcaacatagagagacctcatctctaacacaattttttttttgaaacatgaaaaatgaagatttctgaccatgcttctctcattagttaacactttgggctgtgagggtctgatgcagagagacacagcctgggaggatcctaacatgtacacagcattcaaaaggctacaagacactttctgttgtgtccccttgaacaagcagtttgtaagattttgttggccaggcatggtggctcgctcctgtaatcccagcactttgggaggctgaggctgatggttcacctgaggtcaggagttcgagaccagcctgaccaatatggtgaaaccccgtctctactaaaaatacaaaaattagccgggcatgatggcgtgtgcctgtagtctcagctactccggaggctgagacaggagaattgcttgagcccaggaggcggagactgtggtgagctgagatcgtgtcactgcgttccagcctgggtaacagagcgagactcggtctaaaaaaaaaaaaaaaaaagaaatcaggttttgtctactaaacctgctgcacggttaccgttactagtactcacagggtttgttgcacatgcatcgttgctaatagtgctaactaatattaacagcccttgccctatgcctggccctgtcccagcccccctcccttgtataatttaacccttgcactgggggtagagattttcatatctactgatttcttacctttgctcatttatcatggagtgtcctttggttttctgtgtttgtatatacctttaccacttatagatttgaccagcactcaagaaccagtgttactcctgggagttaatacaatcccagccccatggcaaagaaactcatgtggttaggattctgtgtgcagcctggttagccacagggcacgtaaggctttttataatattgacatgagtgcagaagccccattcccgtgtaagccctgagggctcttgtttcataatctttttttggtcacatgcacacagctttattgagatataacccactcatttaaagcatacaaatcagtgggttttagtgtcctatattcacagagctgtgcagccatcatcacaaatgtggaagttttcatttccccaaaaagaaacccgtacccattggcagtcactcctcatcttcgcccccagcccttggccaccgtttatctacacatacttttgaaaggctagtgaaactttctcagaaaaataaatgcttgctcaaacatttgggctataatttcaggggcttcatgggtgcccccctgacatttatcaagaacaccaggttaaggaatttagctataatggaggcctctgtgtttcccagtctcctgggtatcagaggcccagagagggcaggtgccttaccctgggccacgcagtgaaccagtggcagcaccatactcacacatctcctttctgcggttccccagtgacagagttctcaggaagctttttcatttattttctgagaggagggtaggccatcttgtattgatctccaactatatgccagccacaattctaggtgcttatcataaaggttcatttaatcttcacaatagtcctgcagagtggacagagtccttcagagtgggcattataatcaccattttaaagatggagaagctgaaaaccagagaggttaagtaactcacccaagactgcacagcaaaaggctggggctttgaaactcagggccacagactccaaagactatgtcctccccactatgctagatttttttcctaacctgtgaataggagacaaaatagtccttttatttctcacagttgctttgcacactcagaatccatgatttcttctgcatgagggccattcagacctgtgcagaagagagtaatggaccaaggagtcttgggagcacctaggaggaggggatgggggagcatgaggaggagccagggaacagcagcagctgcagcaccagctcccaccccagcctctgccagtctcttggaggtggtgtgggtgcagacaccggctcacaaggtgccctgttagtgagcttggggtgccatgggagccttcttgttgtcaggcccaacccaagctggctgaagaacaccctgatggcctccatttgagcacaactaatgaaggactggatgccagagataagtccaggagggtgatgctgcagggcaggccagggaagagggtacttcatctctatcatggtcctctgcccatccatgccagcatctaacacctgttaaacactgggaggcaggtggtgaaggggccacttcccagcctctaagatacctcctaagccaggaggcattctgtgattaaattacagggcctcccacttactcctttatccttgaggcggtgctggaagcttaatgccaatctggtgtagggctctgggactacaggaccaaggcaagcagtcctttctctctctctctctctttttagctaaggaagccagcacatctgttctttgagaaaaagccctgtatttagaggtgtctgcctttgaaggcaacctgagaaactgtcatcttggcgctttggggactggccatttacacttctcataaatattcagaagtaggcagtcatttacataaagctaaatgcagaaggaattctcttttcagggaatacctggcagattcattaaaaaaattaaagaaaccaagagcataagaatgaaaagcgaattctcggaccccaggctggttttttctggcatgggtgcagtaactttgcctctttgctcagttatcacttttttccaatgacagtaaccataagccctgagagccagcaaatagaacaaaaggtgctgtcacaaacattgtgcaatctcatctctgagatttccatctggaaaatagactggagagagttaaggcttcaaccagccttgcagataaatgcagttagttaccagcccagcaaccctctgcttgcatgagagcccattatgctaacctccttttgaaattgctttgtttctcctccttccctgcactccactccccaagataatttggaaacctgggcaccaaggcttgtcccactctaggggactggggaaacagggattttgccagcacctcctggcagggcaaccatcaggtcaaagggacctgacccatgaccccttcctcagatcattgtgggtgtgattctcctctactacatactcggagtcagtgccttaattggagcagctgtcatcattctactggctcctgtccagtacttcgtggccaccaagctgtctcaggcccagcggagcacactggtgagtgcccaaaggtgtgtgtgttttgtccctcttcccctccttccctcgacagcagcaggtctcctcccacacacccacactgtcattgactttgactttgactttgagtaggccacttcacctgtccaggcctcagcttctttgtctgggaaatggagtcaatgggggaggaggctgcctcccggtgaggacaggaggcgggcatggcagtgacagtattgacactcaggccttcctctcgggtgggagacggagcagaagcctctcccctctgactcggggacccctgcaggagtattccaatgagcggctgaagcagaccaacgagatgctccgcggcatcaagctgctgaagctgtacgcctgggagaacatcttccgcacgcgggtggagacgacccgcaggaaggagatgaccagcctcagggcctttgccatctatacctccatctccagtgagttcaccccacacagccagccctgggtgctgctgcgtacatgcaaggagagggtgtcagagctcgggtaagagggggtgcagggacagaagcaggaggccttgagattatccgactcagtaggggagcctcaaactggctctgatagctaagctcccagaaatcaaagtactcttcattcatttatccaacaaacatgcatggaaagcctgctatgtgctggacactgtgctggccctcaggatacagtgatgaggaagagagatgaagtttcattcctcatggaactgatatgttattgacagacagcagcaagtaagtaaatgaccacagttttgaactctcctaagaatgaagactttttagtaagtcagactgagctgtcattgccctggggaagctacaagaaagcttccatccacttggggctatgcaaaagaaaaagactagttatccttaaatatcagaagcccaggctgaaggtactcacaggtgtagggactgaatttatattaaccaagtagtttgggaaccccaagccaaggaagaagaaaaagaccaaaactggtaaaagtcctagagtcccatatacttgaaaccattttactgagaatgtaaaacttttttttctttttttgagatggagtctcgctctgtcacccaggctggagtgcagtggcaaaatctcggctcactgcaacctccacatcccaggttcaagtgattctcctgcctcagcctcccatgtagctgggactacaggcacacaccaccacacccgactaatttttgtatttttagtagagacagagtttcaccatattggccaggctagtcttgaactcctgacctcgtgatccacccgcctcagcctcccaaagtgctggaattacatgcatgagccactgtgcccagcccaaaagattttttagaaattgaaattttagttatggaaattaattcagtgaacaatggtcccctggtcagagtgagggcttacggaggtcaggtgatccatggagtcctggcccaagtttatctcacagttggtctcgtggctccgtggacccatcccatggtggttacttcccaagtgcataattgggatgtagatatttagcaaccagctgacttcacactagttccctgacctgtccagtctaagagtcattatggccaagtggaagcccctggaaagaagaaaacaaaaaagaaaccaaaacttactcagtgcacaggttacatgaatgagtatagctgaagagagaatttttgaattagaagacagatgagtggggattacacagaacgtggcaaggagagtaagttggtagaaccattttacagatgggaaattaaggccagaggggagtgtgttcctgagatccctcctgaggttagtagcatggctcggactagatcctccaaagtctcttaactcctggtctcaggctattttccacaaagagctgggggcctctgtggggtgaagaagacttaggacaccatggggcaccattatgaggccatttcctcctaggagaaaaaaaatctctgggctctgaaaggagtagaattagggtaggaaattaagagaggctaccgaccacctcctccaactaaaattggttcttttggtgccaggaagagacacacctggtgggggagggaaggtggtaatggagggggtgctggtagtgtctcccagatagacccatccaacaagtctcatggagaatgagacggtcactcaggtcatctgcgtattcttggcattcttgctgcctagagagagagtctgatggagctaggtggccaccaagctgtcccactccccaagacagtttggaaacatgggcaccaaggcatgtccctgtctaggggactggggaaatatcccatagcagtgttctcacagtatggggctggccatgaataccccaggagtccaacctccctttgtccagctagaccatggtgtcctatgcctcaggcagggaatgtggtccagtcatcagtggctgggccgtctgccatacatggtgcaagccatggcgttttatgcagaaagtcctgctagcatttgattttctcagaatggagctgtgagcatggcaggcaaccactgtttcctggattcttcaccaagacaccccaagttcctggtctctccccgttatcctcatccctgaccctgtggttctcagagcctccaaacacactcaggctaagcactccatagacaggggaaatttggaaggaacatctagggagctcagaaaagccaatgtccctagccccaggcccacttcaaccttctctctgtcagtcctgcctgcccctggaggctggttacatgaagagtaaccccctgcttgtgtatagccccccagttttgtacaggtttagagacagttcccagcagtaggaacagctgccgaggtgggagagggcttctcccgatagccgggggacttcctctcccaggaacaacagggtggggtagagcaggcttgtcgttgctgagatagagagagggaagggaaacaacaaggaaagtgggggcactgggtccccaaggttcctggcacagcaagcagtgaagttggggcagcctcaggtcatgtagtgggggcaggtgacatctgctttgactgctcctaagagatatgtactcatctcctggattccaaactgcagcctgggacatgttttcttatataaacagcatcaaaagatgtgtgagttcccaggctagcccactgaaccctacctagtgggtgctcattgtcccccagagcccccagaagacaagccgtggctttgtgatgggcctggggccaggaggacctagggatatgttgtgaagagctgagaagactctggaaaaaaggggctctggagccaagcaggagcccgcccaggactcctcacgtgtccaagtcacctagggagagaaacagagcagcccaggttggtccctggaagagagcagcggaggaggggaaaggggagagcccctggggagagctttgaaagtcaagtgctgtttgctcagtgtgtttgcctttccgaggatgtgtttttttttccctccgttagtcagcagtgggagggggagagagacgggtggtagggtgcagggtacctcctggctgcaggcatatgctttgagtgcgtgttcatttacctcctctggacttcctgccttctgttaccagggatcaagacacaggtcattaggcgtgaggtaatggggcatctcttgttctgacccctggcgccagtcttggagtcctgacgctgcagaggagccccagagtcacatttcctgttggggcccatcctgctcatatgcggcaccatcagacttctgggcaggcaagattacctgtgactctgtctgatggtctcgccatcaatatcactgagagtagctgtgtatggagtcccgaactggtacaggataaaacagggggctgaaaagggaatgaatgggcacagtttctctggcatcaaaagtcacatccagaattgatatttcctgttgagtaaaaatagaaatataagttgctcagtggatgttgagtgagccctattcatgtgccccactctgtgccaagcaccaggaaggagggaagggaaaaatgataagatgttctccccgttctccaggagtttatgctccactaagaagtcagagctaacatgcacagaacagtgtggcagcgagagcagaaccgtgtggccagctccatgcttgccgcctagcaagcgtgattgcacttcatcctcataacaacttggtgaggtgtgttgctctgttgtcccattttacagcagagaggactgactctcagtgaattgaaatgtctcagtgaggtcttccacagcaaaaggcgaagcacagagaaggaagtccatgtgggctgggagttcacccagagattcatgtaggggcaatgtgggctgtaccttgcaagatggtgggatttcaatgaggagaagacaaagtgggaggaagctggagacaaggactgtggtctcttcctttagaagtcagttcaatctttttttccttgtggaagcagcataactctaggtggttcctctgtatctgaggacaagctttgtagaggtgacaaaggggtcctaggtcctatcaggcaagcactcgatatgctgccagttcattctgtccattgtgagatacccattccagagcgcttcctctgtgccaggctctacggaggttctggatgttaaagaggaagcaggcatggccctggccctcccagtcttgtgggagattgatcatgcccatgaatagtgaccatgtggtcagagccacagggtcaattccaaatgcccctgtttctcttttgtgttactcacctgactctgggtctttcgtttcttccattcattttttttaaacaaatatttcctgcccaccttctgtgtgccaggcctggggatgcagtgggagaagcctctgtcctcctcagtggaggcgctaactcagaacaggcagtggagaaaaacaacatgacctggagacctggtgccccttccttccccagcatctttgaaattcttttggttgttgttgttttgagatggagtctcactctgttgtcaggctggagtgcagtggcgcgatctcaactcactgcaacctctgcctcccaggttcaagtaattctccctgcctcagcctcccaagtagctgggattacaggtgctctctaccatgcccagtaatattttttgtatttttagtagagacagggtttcgccatgttggccagcctggtctcaaactcctgacctcaggtgatccacctgccttggcctcccaaaatgctgggattacaagcatgagccactgtgcctggcctgaaattcttcaatatctacctgcccttctgccagttggtgcagccacagtgggctgcttatgcatatcctggcctggcttggtggggagcatggctgagggagagccggggcacccatcaattaaggaggtaaagatcagtctgactgagatgcctcctgccacacttcctcagctgccagcaactgacaccattaacctgatttccttccccctctgttgactgcactgactattggactgaatgggaaacagccccgtgcacctcaaaatgcacttcccctcctgcagatgcatcttgcaattaggcccaaactgtgagcctgcatgctcctcccctggccctgcacaggcaacaaagctgaagttaatcagaggtacaaatggctggctatgcctctctgacacgtaacttctggaacatgtatcaatgctttggaaatgaaaagctcctggtattgcaatgccaggctggtgcccataagggccagaaaacattccttgggcaaagccagggggagtgggtgatctgatcccagctcaggtttgttgatttgttgttttgtttgtttcgttttgtatggggcaagggttgagggtatgaaaaacttacactatcatttactaccgtagtccccagaacccagcacaccagcacaaggcctggaacagggataccttttttgaatgaataagtctttttttttttttttttttttttttttgagacagagtttcactcttgttgcccaggctggagtgcagtggcgcgatctcggctcactgcaacctccgcctcctgggttcaagcgattctcctgcctcagcctctcgagtagctaggattacaggtatgcgccaccacgcctggctaatattttggtatttttagtagagatggggtttcaccatgttggccaggctggtctcaaactcctgacctcaggtgatccacccaccttggcctcccagagtgctgggattacaggcgtgagccactgtgcccagccttgaatggataagtcttaagggatatttttggaaaggatattctaaaaaatacccatgtctctacactattgcagaagggctttcagttttgatggcagcctttcaggccagcctacacgcaactaaacttttccataacagcatcacacttacacaagaagaaggttttataatccacttgccattatttaacatagttcttcctccttaactttcaagatctgagcactataatgttcttctttttgtttttgtttttttctaaatcaaattaaggtgagtcacctcaccttgggcctgagttggacagaaatctattcttggctatattccccacccctccaccaccttggaaccttatagaactttatgtggttcaggaaaatgagggcgaggcctcagatcttcaacccatgacagctgtatgcccagctccctgccttcctgtcttacccccagctagggcacaggactgactattgtgcccagagaggtgccagagcctgtaacaaccccagacttcccaggtccagccacatccaccccagagccccaaaagatgatcttcagagagacctttaaaacacaagtagctggtcacttccatccagaccagaacccaagatggctgtgctcttgctgagacatgttggttgtcattgcctccgagcccactttagccctcagctctgtaccagaaatgctgttcctttgggaatcacagccaaagaagagatggagcagttctggaataagaacacaagttcaaactgtcccatatctccccacatcactatctacagttggtctcttcccatggcgatgtccatctgccaccgtggcactggtattgctttgagtgcaggggtctctctttttggcatgttggccctgttactccctgggaactttgagtcttatttggaatgcgtgaagtccctgtgtccggggccagcactgatccacacagctaagtttgcactcatcttccctctcatgtatcatatctggaatggggtctgacacttgatgtgggacctaggaaaaggcctgaagattccccagctataccaatctggagtggttgtcccggttcttactgtactgtcctctgtagggctggcagccatgtgaagaacagaggttcccagcatcatcttcctacacattattacattcacccatctttctgtttctcacttttatctccagcctgggaaaagttctccttatttgtttaaatccttttgtgcttttagatccccttggagcagtagagtaccttgtagaccataagagtggaaaagggtctagttttctccttgtttctaaagatggggtggctgaaaaaactccccttttttgcctacagcttgcctctctgggcctagaagtggttattctgtctccatattggcctttgatttgtgctgagggtcagcttttggctccttcttcctgagacagtggaaacaatgccagctgtgtggcttctgccctgggggctgggggtgaggctttgggtgccactgcctgtgggttgctggcttaaaggacaattctgttcattggtgagagcccaggccattaacacctacgcagtgttattgaaagaagagaggcgggggtggaggggaattagtctatcccagctagagggagataaagagggctagttagttcttggagcagctgctttgaggagaaaatgtatagcttttgacacaacaggaagatccagaaaattatcattgaacatattaaaggttatttctttttcttgcaaaacacacacacacacacacacacacacacacacacgcgaacacacgcagctgatgattctactctcccagccccagccctgaaggggacccagaactccctgcacaaaggctgtccttcaaggggagggtgaaagaagtggaaaatcacattttcattctttagcgtctccatacaacagccagaactgggcagaagctaattatatcagaagcatactccatgttgctgcatcagctttgggatgttcatttttaaatttatttatagcttgtctcattcctcaaaggagttcagggagctacaaaaataaagacaataaaattgaaaaaaattaaattaaaaaaaccatgaccagggaaaatgtgcagtagaatgaagtgtcaattatcacgttttctgactgcaaaatctcccccacggctgatgcaccatcatttactacaacagcccctcttgttggacatttccagtttatttcgtttgggatggtttgttgctgttgctgtggttgtggttttgttttattgaattttgtgttagctgcagctaataccatcttgctgatggctttgcgctgctcttgaatgattactcaggataaatttcctggagacggattataggatcagaaggtctgaacttctgtgtggctctagctacaaagcaccagattgctttccaagagcgttgtagcaatttataatccaacactcagcctattttttggctgggagtcaagccccagaatgtgaaggaggggtcttggcctggagcaggggctgagggatgggtgcacaggacccctccttattggttatttatggggatgggccaggaggagcagaatagaggcccctgccctcccagttgctccttggagtgactgaccccataggggaggggcgaggctacctcacatttagaactatgtagttggtgatggtcaaggtcctaggtctgatgggcatcctcctccctctcctcctcagccagtaatggctgcactatgtcgtatgtcctagatctgggtcccttttgctgtgggaacaccaataatacttacgctgtttcctgccggaaacggtgcaggagggctgtggcatggtagtgggccctggaaaccatctagccttcatgaggaagggcagttaaagcacaggcatgtatgatgttggtattgattaaaagcctcacgggcagagaaattcgccatctgccagggccccagccatacgagggctccagccatacatcctccaggagactgggacctctccaattgcaggagccttgccttccccatcagattaggaattccccgaggatggggacaatgtccttcccacctgcttgagaactcctaaggggcatgtactctgtctccccattgtatctggaacttcctgggagcatagctcctgtctccgtcctcagactgggaatcccctaagggcagaggccatgtccttccacccacttgggattccctgaagttggggaccacatctctgatgtacaatgctttgtatgtactgactgctgcaggattcttggagtaaatgggcagtcaacttcttggactggtattgaccatctggacttcatcagagtgtccaagactttgccattcattagacaggggccatgtgcacaggcagagccctggcctctggcttctggctcctgactcctggtccctctgctttaatttggctaatggcagaaccagactcctttctgggctgccctggaaggggatccttgaatgaaagaggatagatgggaaggtggcagctgacatggttacctcttatgccatgggggggctgctctctctggaaatttaggcctggggtcagggcactgttgagcattttacaccctaggccagaggaggggtgacctgtggagcagggctaagctagtagcccatgaggtatgatgtgtaggcagcacctggggctcacagagcctgttacccatgttatctcctctgaccttggaaagagctggggtgtatgaacaagtatttataagtttacaaaaatcatatgaggaaactgaggcacggggaaggtaaatgacatgccctaggttacacagcttataagtagcagggattctgcccttctgtcacaccaagtcccactgtcttttcttcctggagtccctgtgactgatctaaaggccacatgtttaacagaataaggaggaggcctctgttgcagcaaaccagctaccccacccgcacacagactctaagggacatcctgctttaagctgtccttagttactaatacctcagtgagaatgagtttgaaattttctcaagagccatgggagactaggaagtctctaagcttcatagagagcctggcttggggggacacaggagccaaaggcagaggaagaagtggcagctttgtgcccccagaaacacgtgctcctgacctcacagttggccacagccagccaactctcccatccttctcccaccactttcccgtggggctaacttcaccctgtccacacggagtgacttaacagtttaagccccagagtcgggggccggggtacctgggacaagagtcctgagggaaatggggtgaggaactggaagtgccacagggctagagttctgcccctagcctactggagctgtgccccacaggctggccccactggactgcgctgcctccaagccatcctgggcatctccatgtgtagctgtcacgctcctcccactaaacgcctccctgtgcttcctctgcagttttcatgaacacggccatccccattgcagctgtcctcatagtaagtggatcctttctccatctcttgggggtagggtggagggggagggcgtctgcagtgacaggctgcccagatttggcctttctgcacaggggcctcagaagacaggctccacagccagactgaaaataggatcgaaagtttatagagggtgtggcccctccccaactccagccgaacaggggcctctgcctccaggcctggaagaccggaggcttagtatttagagaaattaaactttcttttaaaaaatagctatccaaatttttaatttttaaagtgaaacatgtgtattgtagaagtgatgggaaatccagaacagaaagctcaaagagaattaaaatcacccataatcccactggtaacatttttaatgtgtttctttccagtctttttttaaggcctatgatatgtcattttctacaaaaataggaatgtgctatgcatgcagttttgcaacctgctcttttaaatttaggaatatgccacacacaattctccatgccactgaatattatgatggtggctttctaaagcaattttgataaaagctgtgtgtgagctgagccatgggggtcaagcagcatgctcctacagaaaggcctgggcccctacgagcctgcagccccctcacccagcctcccatccccatcttctgtgatggctgcagttccttaaaaagatctgcttatttcccccggggccagtgtccctgagctgtgtagagttcacagcctgtcggatacacttgggaattcacttccaatgtgatgtattgagctggttcctggcctggctcctgggggaactgtgggtaacagaggccactgagccagccaggtggctggggcaaagcactgtgcagtttcgtaatcactctgtttacgttatcccgatgaggactggggagatgagcaccccgcctgctgtctgcagagggggccgtgctgacctaacccgagatctcctccctgcttattcccagccaagactgggcaggacagggagtcttggccaggacagggagggagcagcccctgctctccagcttgaagtcctgaacttgttggggacgtttccatgagatgactgtggggatgatgaaggtgtctccaactaaaagatcctcttaggagcctgctccctgacagccctctcatttcccttccagtgctgagcgtttccagtgtgggagggacccacaccctgggccaccctggcctcacttgtgcctctgtccacagactttcgtgggccacgtcagcttcttcaaagaggccgacttctcgccctccgtggcctttgcctccctctccctcttccatatcttggtcacaccgctgttcctgctgtccagtgtggtccgatctaccgtcaaagctctagtgaggtgaggggagggtccgggcgagggcactgggcaggcaggtcctgtgtcagcctcaaggcttgctcgagtgatggccaaaccacagctgtttggtcccggaacacacccccattgctgggccttgctgtagctggtcctggttggtcagagggacattggcctgtatggtttcccagctcgccatccctgagcaaggacttgcttacatacctcccaggagaggggactcactgtcactttcacgacaacttaaaaaaaaaaaaaaaccagtgttgagccaaatgtggaatcctcctaaattctacccactggtcctaacttcaccctccagagccaccaagaatgaggccatcccgtccccacgtggctgccccatggatatcagaaggcatccactgtgtctatctttcccaggccaagtatcccctaccctttccacagcccctgagccctcacagcctcagccagtgaaacagcttcccccaagcgctgggtcctgctctgattggcccacagctcttggaggctcccacttccaggctctagagcctcatggggactctgccactgtcccagaggcattgccctcttgggaatgaaagcctgaaggtagaaggctgaggctttggctgggaaatgccctgtctggagtgagaagatgtccttgggcctctgaagtagctctgcctccttgaaagcaagagcctgtcatgcctctatggagggctggcttgtccttacccatggccagagaaccagtcagtaacaaatgtcctctgtgtcttcagccttgaggaaggtgacacccctgtctcatgggaccctggcaggtactgggaagctggaaggaaggagtagctgttggaatgaagtagctgatagagagggtagcttgcagggggagactctagcatgggttcaaagatggaatggggcataactcagcaaaattatgctctaaggagtatctgaccaggcagtagctggttaaacagggattagctcccatttccacagtcggctgtgctgactcagtttcttgaccagggtgttgtggggtctgaagatcacccctcctcccaccacccactctccagccctatgattctgtgtagaaaccacagatttaagaacgctgcacctgcctgaaaactgttgcactgatcccaaagcgttcatattttcaaacactctggatcccactgtttccaggaatggaacaccagagtagcagaggccttttcagtgaggcagctcaggctctggctgaaggtgggcgcaggacactacctgaagcttcaccccaagagatgagggccagctccactcttcccagtcaccgcctgtgggggagggaggctggacagggcatgaaggcagagcctggtggtctgcccctcccatctaggggtggcgcacagaaagggagactccaggccacagctcacttacaccccagaataaccttgccttgagggtgggatggcttgtctgccccaggcctgttggacatttagcaaaagagaagaaaggggaatacaaacaatcctgagcttcccagaaagctttcacacctccaggatgggagagaatgaactagaagagtgaagcttccagtgcttcctcaggtccacagggaaatctggacaggggagagggtaggaatagccgcctcccccgtgagtaatgacacctcctccagcaggctgttatggggatccgattacataatgctacaaaacagttaacacagtgtctggcatttagtgtatgctcacaaaatactagctattgattctttaccaatcctagtcctaactaaccttaaccctgaccaatccaacaccaaccatccttcagtctaataacccagactaactaacttcaacattaaccctaaaactaaccaatctcacctccaatccagaccccagcctattccagctgactggtcaaccctagcaaaccctggtaacaccaattacctgcccccatgcccactggtctgcccccttcagtgtgggctttgtgggactatacttcaggcctgagatcctgctcagagctctctatcaggctgcgccctctcccctcccctctgcccctggcaggggtgaggggtgtctctgtgcttcccgagcagcgtgcaaaagctaagcgagttcctgtccagtgcagagatccgtgaggagcagtgtgccccccatgagcccacacctcagggcccagccagcaagtaccaggcggtggtgagtgcccggcctccccttgctactcccagcatggtcctctaaggcccaaaacttgggcctgctgtgtcggacttctgccttttttcccaggaagaggggctcccttccctacacagctcccagcccagtgggtcctcacctccaaaccacccccagcccctcagggttgtgaaccgcaagcgtccagcccgggaggattgtcggggcctcaccggcccactgcagagcctggtccccagtgcagatggcgatgctgacaactgctgtgtccaggtgagtcctgctgccccatgcctggccacccagcaccaactcccagagggagctcagcacctggaaagccagaaagctgcatgcttagtcctctgcagaggtcaccctgcctgcctgtacggtccataggagtccagaaaccagggaccaccaagtggggggacccccagccttaggcaagggtcagcatgagaaggccagtctcccactcccctgctctggaagtgatccaggggctggaatcagtgtcttttggctttcatggaggaggggaagccagagactattcactgggaactggctgcctttctgttctctcctgggcggtgggacacgcctaatgaagatcatgggaggctacttcacgtggaccccagatggaatccccacactgtccaacatcaccattcgtatcccccgaggtatggcccagtccacccctccagcatgcccctccccatgtcccactgaataacatagagataaaaagacaaagctgcatttattgagcacctactctctgctcattcttggtgtatgccctgggtatattatagaaggggaaggctacattctagaggcttccgtgtgctgggtgggagtgaagcactaaggacagggtaaaattgccagccttaatgtcaaaccatccattgcagacagtataggtaatgcacaaaaagatcagaagtgggtagccaaggaacgcaagtggaagtgatggggtttctgagaatggacaaaggccctgaggccatgaggcaggaggattttctggcagaggcagccatgagcaaagtatggaggtgggttggaggtgggacccaggatggtgtttcttgggaccacaaggagcctgggctcatactaggagcatgggaaaggagaagcgagtgcttaggaagggtggcggggcaggaaatcagagagggggaaggacctggggagccagaggaggatgttgatttccagaaggaaaggattaaagagggagaggacttgctggggattctaggtaggaagaaagaaaacaggggccccagggttgggtgcatctgtctgtctgtctttctgggtaatggttgttcagactcccccggccccactcacatctgccaccctccctccctgcaggccagctgactatgatcgtggggcaggtgggctgcggcaagtcctcgctccttctagccgcactgggggagatgcagaaggtctcaggggctgtcttctggagcaggtaatacatgtatcctcagggcccagtggaggggaaatctccttttaaccatcctcctcagttgaggatgcacacacatttattggagggcccactctgtgttcagtgaggactcaataaatgctgctaatggatattctcatcatcatcactagtacgtattcacctcttactatgcgcaggttctttgctaagtcctttgcatgcattatttcatttaatttttatgataactaacaaggtccatactgttctcaattctcatttatagaggaaggttaaactatttgtcctaattcacacagctaataagtggcagagctggaattgaaactcagttctgtcagactctgaatcccatggttactcagatgcacggcagtaatttcccagtgtgggaaattgcaacaccaacattggtttccagcttggtcctgagctgcactgacctacacaccataagtgggtgttctgaagatccagatgtaaccaataaatgttggtttctgggcaaagatcactgtcttaattaaagagccagaaccccaggctcagtcaatcacgaatctgttatttatacccacctacttccaagaagcacttgaaactagttgatgaaagattcatgtaaaaatcaaaaccacaatgagataccatctcacacccgttagaatggtgatcgttaaaaagtcaggaaacaacaaatgctggagaggatgtggagaaataggaacgcttttacactgttggtgggagtgtaaattagttcaaccattgtggaagacagtgcggtgattcctcaaggatctagaaccagaaataccatttgacccagcaattccattactgggtatatacccaaaggattataaatcattctactataaagacacatgcagacgtatgtttattgcagcactattcacaatagcaaagacttggaaacaacccaaatgcccatcaatgatagactggataaagaaaatgtggcacatatacaccatggaatactatgcagacataaaaaaggttgagttcgtgtcctttgcagggacatggatgaagctggaaactatcattctcagcaaactcacacaggaacagaaaagcaaataccacatgttctcactcataagtgggagttgaacaatgagaacacatggacacagggaggggaacatcacacactggggcctgtctgggggtggggggcaaggggagggatagcattaggagaaatacttaatgtagatgaagggttgatgggtgcagcaaaccaccatggcatgtgtatacctatgtaacaaacctgcacgttctgcacgtatatcccagaacttgaagtataataaaaaaagatgcatgtaaaataaaaccctttaaaaaggtaagaaaataggaactgagaaatgaagagggtaaaaagatgttcagcaacctgggcagaggacaactacagccatcaacataaaacctggctctgtgccctctggtagccaagggaaaaagggatctctgggctttggagtattcatttaggaataaaagttgcagccaatcagcagaagggcaagctttccctaccaatcatttctaggggaaaattattgaaggtgtcaggtttttcataagcatgagtacagaactgagcagggagaaagactttgggcccaatgtctgaatatcaacatgcacccccgtttcctgcatttccaagatgtccctgaatggtgtatccaaaagatggcaaatttccctcctcagtggggtcgtgggctagcagatgagccccttgggtttcccatcacctcccatcagggactgtgatgtctttgggggcagaggggtctttgcctccattcgccattttatttgggagatttttcaacatagcctgactgggaaggcccaggtattcggtttgagatcatattgccttattccgactgcctctccagcctttggagggaggagcccttttctgctgtccaactgcatgcctgcagcaagaagacaagagtccccagtgcactgtgagctgaagaaagtaaccaatatttattgggtacctcctatgggccatgccctttgctaagtgcattgtcaacatgatctcatcaagcctcctactaagtttaggaggggagtgttgttaccccatttcacagaagcagaaactcaggctcagagaagttgggtgacttactagtcagtgtgtggagcagagactctgcccatgttctttccctcaaacctggtcactgctggggcccccagggcctagtcctaagggttattgtccaagccccatgtagtggtcaggctggatctgggctctcctccaaggcagggcttttccagaaggattgcagggctcagacactggagctgcccctgccttgacctgctcagcatggatgtcaaaacccactctgaacctggtccctttgccctgctttcttctcctcccccaccctcatgccctcatgtggcatcgtgcctgcctcaggagctctccttgtcctatgtagatgaagcaggcatgattggcaggggtctgctctgccctgcctcagtccccacctcttctccaagctgtgccaaccctccgggtctgactgctgcccctctctcttaggaaacctctgccccagcccagggaacacaaggagcctctccaaggcagaggaccctaagcacttcttttttttattattttttattttattttaggttctgagatacatgtgcagagtgtgcaggtttgttacatagctatacatgtgccatggtgctttgctgcacctatcaacctgtcatctttttaagccccacatgtattaggtatttgtcctaatgctctccctcctcttgcctcccaccccccgacaggctcggtatgtgatgttcccctccctgtgtccacgtgttctcattgttcaactcccacttatagtgagcacatgtggtggttggttttctgttcctgcctaagcacttattataggccaggcactgtgcaggcacctcatcatctcagtcagtctgcaccgaactctgtgcagtagatattattatatcctcatttatcagattaggaaactgaggtgaagcaagttgtccaaggccacccagctgttaaatggcagaagtgggatttgcacctaggtgctcaagtgcattggtttgccaccatgtgctcaaagagaaggggcacaagagcctcatgaagaaggcatagctagcctgacagtccaaaggccagcagccgctgtggccatgactcacacacacctgcctcctcccagaactgccacgtgggtcctcacagctctgtccttatcaacacttactctcctttacaggtagcctaggccccagctcccagctctgttcgaggctcgcagaggggcggtagtgaaggggtctcatttctccaggatcctctttgctctctcgcccggtcctggtccagcttccctttcaagcatagtgaagtgcatttgttagcttgcagccaaccctgggaaatcatgagaatttgttcccaagtcaactcattctccagcgtccacagtgacgtattcactcacccagttgagcgcctagtgtatactagaccctgtgacagcaacaggagtgcaaaggtgactaagacgtggcccctgctttttttttttttttttttttttgagacggagtctcgccctgttgcccaggctggagtgcagtggtgcgatctcagctcctcacaagctctgcctcctaggttcaagcgattctcctgcttcagcctcccaagtagctgggactacaggtgtacaccaccatgccggctaattttttgtatttttagtagagacggggtttcactatgttggccagggtaatctcgaactcctgacctcatgatccgcccgcctcagcctcccaaagtgctgggattacaggcatgagccaccacccctggccggccccgcttttaagagaggggagagaagacctgggccttagaagagctcagaggaaccacaattgactctgcagtcaaggagaggaggctcactgcggatgtggtatttgagccttgaaggatgagtgtggtttcatcaagtagaaaaggcagggatgggaaagggaggtggtccaggcaggggtgatggtgtgggcaaagccttgctgatattaaagaacatagttctgtgcacctggaacactggatgcatggggtgcattatgaaagatgggactgaagaagtgaacttggcttagatcccatgtagtaggtctgagaagtaagatttaacccaaaggttgcaaaagaaccatgcttgtgataaaggatgatggattggggaaacagagaaaaagacagacagactgtaggaagggaggtattagcaaataatcataacacagtgtgaggtgtgcattaatattcactcattccaagtattgatcaagaagagaggtaggtactgggttaggaaacagcttgggcaaatgcatggggaaatgagagatgtcaagatgcattctaatggcagcctcttgaagatcttaagttgtttttggttcactcatttcgcaaatgaattcatttagcaaaagcactatggatacagtgcttacctctaggaagtaagttttagcccaaatgctgcagaaggatcatgcttatgacaaaggatgatggactggggagagagaaaaagaaaagacagacagactccaggaaggaaggtcagtctgcagctccttatagtggctaggagaaggagtctaggcagatacgactcaattagcttcatctgctgtttgtctctcaaaatctagacatgtgcactgctctggctggcccacctatcctgggcattgagttaagtgtgggggctgtgtgttgagagtccccctccattactggcaggaactccacacctcagacattgagccccaggtctgcagggagaagacgtgcttgcaaagtgagctaaaagcaaaacagcctctgacctggcaagcattcccaagtctgcacgcctgcagccagaggagagggtgatgccaggctgctgctcagatgcttttcagccatacccaggccaagacctggtgaccaggcagccagaaggagttccaggaggcacaaggcaggaagttgggggattaggaggtgtagaatggagaatgctctggggagatgggtgctttgttggtgcaactattcgtttattcctccagtgaccacgtgagcagtatggctgcacacacaggctctgcagccaagctgcctgggttcacatttggtctctgtgctttggaaaatttcataagctttctctaccagtttcccttattacccatgagattgatgtgaggattaacctagcatgtagtaaatatcctataaatattattattcaatagtgtacttctttgccaggaacaaaattcacctgttcctctttaaatgtcctccagtctgtctcctgggaaagattcttgtgagctccctggggacagggaccatattttgtttgtctcactgtatccgtagtgctttttgctaaacgaattcacttgctaaatgaatgaaccaggaacaacttaagaccttcaagaggctgccattataatgcatcttgacatctctctcctttccacatgcctttgtccgagctgtttcctaacccagtatttcactacccctcttctccatcaatatttggaatgagcaaataccgttagtgcatacctcacatggtattataattatttgctaatgcgtctgtctcctccatgactctgagctccttgagggattattccatgttgtaccccaggtgccccatgcagatgtgtattttgtgcactgttctgtgtaggctacaaaggaaaaggcctagcacctgcccttggggagctcacccacccaggatggacagaggtgtgcagacagagctgcagggtgggcacaaagggtccatctgctgaagtcctgcagatgcagccccgagcttgtccctcacgtcagcagcctggctcctggtctcagagagaactgtgtggttcccaagcattcactttaggaagaatcacttgcccctccctggctctctgcttcaaggaactgtgacaaccttgggatttgcaaactctctctttaatccttaagaggaaaatgttttggtaaaaagtcaagattagcagatacactcgggtgaaattctttccctggaaataaagaatagagccattaatatccacagtagagtgactttaaatgcccccggggggtcagcaggaaccagggccctgaggaaaggatcagcgtggggaagaggctcccacttccctgtgaggagctgcacatgcagtctcactggagctccctgctgcaatgctgttgcctgtggtggttggtgtggatgctgcctgccaagagccctgattccccaggaagagagaaaaaggcttctctcaggacggccctggtcgcatctgcctgtacaattcctggagcctttggggagctgaagtcaggggctcaagtgcccctgggtttcctggaggaggcaggtgtggtgagacagctgacagacaggagaagggatgctctgaggaagtgactgtccagccatgggaaccagatggcccctggctgtagtcctgatgctgccacttgctagctctgtgaccttgagcaggttacttcacctctctgagacagactcactgtctggacaatgagtaaaaccctacctttcctgtctcagagatttggcaatgggacccaatgacatcaattggaaaggatgctgtgggtgaaaggtaacctttcaggacagcgacaagcctgtctgggcaggatgaatgggctgtggagccctgtatatcctagctcactctttgaacctcagtttccacttcttccctttttatttattgccggggtcttaaatgagtgttgggggtatctgattctccctctgcctgtacttttggggccaagcactgagctgaaaagacaattcctcctagttctccaagcctacaacctgccccctaaccagctgtgagctgtaatacattctccagtgtcactgtgaggtttgtgccttcacccccattttatagatcaggaaacagaggctcctccaagtaaaggagcttgcctcagatttcacagccaatgagtggaaaagcctctgggattcaaatgtcagagcccatatttttcctacttctcgcacctgttatcatatgctgcctcttcctttaacctgcagttccctcccttcacctccaccgtctcaatccttcccactctttaaggttcagttcagctatgacttcttctatgaggctctactcattttctcagatttcttcctcctccaaatttcttgtaaaaattatgttttttctctgattctaaaagaatgcacattacattagaaaagatacacaagcatacagaagataaaaaccacctaatatcccatcacccagaagcttccagtttttctttatgcatttgcatatgcatttgtgtttacttttccccaaaagttctccgatactttgtcctacttttcttttgacccttataacttcctgacttcggtacctttctgatttgccctaccagagtgtgagcccctggaaggcagcctctgcaccctgattcaggttgccacacatatgccagctcctagtgggctggagggaaggacatgcggttggggaactggaagactcatgctttcagctgtgtgcttcctccctagagtgcaggcagaggaggaatcgaatcccctcagcactcttgtaaagaccacagcaatgagtgagagatggtgcctgccagacataccattctttacttttcagcttaaaacagatacaaagtttggggaggctcactggaggaggcttggggctacactggaaagagaagaacttggattcacaccccagcttcccctcttcccagctctgtcacatttgcaaactctgagtctcagtatcctcatgtgtaaaatggggatagggtttatagggttgtaaggatgagatgatgagttgtttgcaaacaacttctcacagtgcacagtgaaggtcagcaatgagagccagccccgccctttcttctttccaaatgattaatatatctgttaccagcctccattcattatatagctctgtcatgtgctaagcaccatgggggctgaaaaagatgttcttcctgccttaaaattccactggggatgaacaaattacacgggagctgatcagagaggaaggcagtccattatgagggctaattgagcagtgcagaccatgttgcaaactgagttagggcctggagagcttactgtgtgctggggtcctcaggaatgccacagatgcatcaataaccacctctgctactctggaagtagtcacatcaggaagactccagagataagcttatctgggctgtggccacagagctggaatttgtaagctttaggtttctatgtctcatgttaccagcttgtctataaattgtaaattacagccatctgatggttagggaatatgaagtttggttaagagaatgaaatgagaccacgaagattagagaacaggaaaagaggggactggggactacatacccatcagaatcttcattcagtcctgaccctcagcaggagggggatttcatcaggctcatttccatccttgatttcgtccatcctggttctcctgacaaggggcatttatcagagttatggcatgggaaatcacaggggagtaatgtaccatggcatttaagagtatgaacgttggagtcggagctattttctccgctacttactagctgtgtgactttgggcaagttacttagcctttctctgagcctcactttctttatctgtaaagtgagggcgatcagaataaacctccttcatatggttattttgagctttataaagagacaatactggctgagcacggtggctcactgccagtaatcccagcactttaggaggccaaagctggaggatcgcttgagcccaggagttggagaccagcctgggcaacatagggaatgagactcctgtctctacaaaaaatatacaaaaattagtcaggcatggtggtacgtgcctgtaatcccatctactcaggaggctaaggcaggaggatcgcttgagcccaggaggtggaggttgcagtgagccaagatcacgccattgtactccagcctgggcaacaggagtgaaaccctgtctgagagagagagagagagagaaaatactactatggtgcttataaaagttcaataaattttagctgttgttagtattattaaagtaagatctgtatgaaaataaagcagattttttcccccaaatgttcatgtcagaagtatatatttcattggcaaggggctgcttctggaaggttgagaggtatcctgggggaggggatagagcactggcaaaattggcatcacaattcaagtcacctcactcagtgttttttaagttatcaaaatccacagtatgaaaagcatttgacattacagtccactatatttatgcatttataaacaagagaaaaaatcacgaaaaatacagtaccacgtgcagtacacactgattccatctattctttttttttctttttcctcaaatgcacttgccgcctacttattccagacccaatgattgggtccctatccacagtttggaaaacactataagaaatgattgtgtcctctcactttccctctctgggatttagttttccaactataaaatgctcctgatgcccagccagcctcaccgctgctccgagtcaatgccaggaacgctgatttagcacatgctatttggagggtacccatccaggtgctgtgggagggacagagattgagaagagtgctttctgaccccacagaggccatttggaaaccctgggaatgggtgggagggttggaggtggggattgcttctcccctaagactcagcgtgatggaaaggcaatggggtgggaactaactggtgttggtctgtcccatttgtgtcccagcagccttcctgacagcgagataggagaggaccccaggtacagccttgggactgggtcagaagtgggtctcaacaaagggaaggggtagggtgggggtggaggacttgtgggtgggtaatgctgagtatggattcagggatgtgcagcctacatattttcagagacatggggctaaggcctgcattctcaatgagggcaaaatttggttcttggggacagaaaacacttagacattgcaatgctttgtggctgtccaaagtaccaaacagatgccagtatatctgtggtgctgaaatttcatggtgaatggagtcagaaaatagactagcgattgccagggtctggtgggagagagagggaagggactgccaatgtgtatgggatttgttttggggaagataaaaatgttttggaattagatagtggagatagttgcacaacctggtgaacgtacttttagtttcagaggttttctaaacctctgatttttttttaagtgacaggaaagacagaaaaaagtatatctaaaaaggctctaggggtgatcatggaaaagaaagttaagaaatatgactgtaaggaaaggagatgggtgtccctcaggccaggcagaaaattcagtcttgttgctttatgttcatgtgcaaatctaaaaaatccaagtgatatagattaatgaggctctgagtccctcaaaaccttccctccccttacctctccaaaaaacacttgagataccctagaggtggtatgaagtcaggatgggaaggttggctcagctttgcaaataagtttaagcctctggcctttgctctccaacaccaaagaggcttcactttggtatattttctctgccctttctccctccttgtccccaactgtcagtatgtgatgacaggctcagcctctgtaatggtagtgatcatatttcttgagccaaaaatcagacctcatggcatgtgacaagtttgcatatgtggatgagaacagagtggcagaatatttgacacgggagcagcttgggcagtccagggcacatggcactgcacctgacatccctggcagatcccccacattccgtggttgtcttctgatggggccatatggggctgcagatcatgcctggagccctcgcagctccagggctgcgggttcccagccccagagtgcaggtgctggtgtcagcctgcctggcctggcctggctctgtccagagcactccttgccccagctgtttgtgcagctgtatcagcctcagacctcagcctattcattccaacctgaatgcagaggctgggtctggaggagccacattgcgggcttcatactcctgatctgacaagttttccccccagagcctgcaccaatggcacctctccccattctccctcttaactgggtcctccagggccctcctcacacacccacgtggtcaggcagcagaggcttccccaagatgggcacaccccactctccacacctctctatgcagcatttgtggctacagactgggtccaggggattgtaaaggcatgctcatgttgggttggagggagctcaggatcttcctggaggatatggttcactcccatgagagctcagtatgcctttcctcccctgctgcagcccagagcgggagacagcgaccgacttggatatcaggtactgcgtcctgggaacattgccccccagggtcaactccctccagggtgctctcaggcccaagggagccacatcaccctgctgggcagcccccagaccccagccccagtgttgggggaggccagggagggcccctgtgctccaccaggtggctcgggagctgctgctgtttctgtgcatccatttactcccttcacataagatcatttttatctgggatctctttttcttttttcttcaaaaaccacatcactcaaaatgtggcttccttggctctgcttttaaaaaaaaaaaaaaaagttcttccatttggagaattacctgctgacttcaaagtccagtggcttgagggctacccaaagagggaggaagccagaagttgagtgttcccttggtttggtcacacttttgggctcctccctgactaaggaacaacagactgcagggctggggcaggctgggtgtagggcagggaggggatgaggtcctgctgccccagtcagttgagacccagacctctcaaacctgcctgggggaaggcaaggccaccagaggccacactaagcagatttctaccaactgcacctccccatccccttgcctccatctgagccatcagcttgacaactgcctctgagaacaagcccctgagaatgccttccgcaccccctactcccgccctgctttttccaggaagagaggccccgtggcctatgcttcgcagaaaccatggctgctaaatgccactgtggaggagaacatcatctttgagagtcccttcaacaaacaacggtaaaagcctgtcggagggaggcaggatgtggaggggaggaactgtctctggccagcctgccccagttccgggcccctccatcgatcacccacacccagccatctcactccccaggtgcttacctgcactccagcctctccatatggtgcacctggagaggggccaggtgtgcctgagcattggggcaatccagctcccataggggagagggcaggaatggagggaagggagagagccccgctgccttttctctagctggtgggagggctagctagctctctctgtgagtctccattcgcctggctcctgcactattttccctccaatgataatagttagggctagcatcgactgcgctcttactacataccaggcacagtgccgagctctttgtacacggaatttcctctcatgcttacaacaacctcagtaggtagatattattgttattcccactctacagatgaagaaccaagtttcagaaaggtcccaaggccacccagccagtaagtgaccaagatgggtctcaaatccaaagctgcctaacacctaagtacatgtttgtcaccaacatactctgatgcctccatgaactctggctggcacctgcccaggctaagggctggctggggaagtatgagaggaacaggctgggcaaatatttgaccagccatcatcattactgcctaaaccaaccagcagtggttttccctgcagtgccccaagcacgggttccggctgcagcttttcccactgcacagagatcatgagcgccctttcatcacttactctgcatatttgttcccaaccaattccatccttctagtatttaacctgcccaaacgctgtgtgaagtgctgacctcagctcttttcaagctcacacggtgtttgcttgcacccaagcgggaggcctattaaagccattgctcaccctgggcatagctacccagagactaatgaccctctgcaagtgctcgggccaactctgaccaggctgaccagctgcatcccctgcctctacccacgccaggtacaagatggtcattgaagcctgctctctgcagccagacatcgacatcctgccccatggagaccagacccagattggggaacgggttagtagcagcctctgaggggttttttcaaagccaggacccccaacctaccatgccctgagacactactcaggacaatgggtaactaggaaataggagacattgaaggctgaagagttgcctgcagtaaggtcaaacatgttgttcttgatgatgtcctttgacaggttttcagtcctgcttggagggcaaggtcagcttagtgccctcccaggctggggatcttcttcatttgcaccccaggtatacactgagagcccacacagcactgtgctcagcctggggttgtattgttcctgttcatcctccagatggggtcccctccacaagcttagacgaacaggattctcctgtgactgtcctccttttgtgtgattttaatccctgctgcctctgtctttgtttgtactggtcagatggtccctagcgcctacacaatgaatctttaaagacttggggctcatgctgccctcttctgaatgaattcagtaaacacgtgcaagttccttctctatgcaaggtgagaagcaggcaaagaagtggatagagccaggcctccatcccaaagagctcatagtccagtagggtacaggacagtgtctcctgaatggctgagggcatgatgtgttcctcctctttggtgacagggcatcaacctgtctggtggtcaacgccagcgaatcagtgtggcccgagccctctaccagcacgccaacgttgtcttcttggtgagtgcaagttcccttggggtcctggtctctggctgcctcccaggcctaactgcccacctccacctccccgcaaccccaccatcatccaacaatctccctctccaggagtaaatccctcctgccagagatattgccttatcatcctagtgatagggaaactgaggcaggcaaggatagcacaaatgacccattgcagacttcagatggagctctgcagtagccaatgaggagaggcaagctgtagttataggctgcctgtctgtgggacagcccaacccctcaacacttatgcagcccgactataagaatggctgataacagaatgtgtgctgccacttcccatcttatgcccagtgcagacattgctaattgttcacagcattatttcccatggaacttaactcatcctcagaatccttctcaacacagcactccaggtaaccactagccatcaaacatgagataaaactaggccaggcgcggtggctcacgcctgttattccagcactttgggaggccgaggcaggcggatcacgaggtcgggagatcgagaccatcctggccaacacggtgaaaccccgtctctactaaaaatacaaaaaattagctgggtgcggtggcgggcgcctgtagtcccagctactccggaggctgaggcaggagaatggcgtgaacccgggaggcggagcttgcagcgagccgagatcgcaccactgcactccagcctggggacaaaccgagactttgtctcaaaaaaaaaaaaaaaaaaaagaacgtattcgcaatccttacactacttcatgtcaagttctgttgtgtcaggtgccttgactgacactgaagaattctaagaaccagtccttggcctcaaagatttagaatctgattagggagacagagctcacccagttcaagaggcccagcccggttcaaatccaaactgtgcggcataaactatgagggggccttgtccagggagacaactgtgagggctggagtaatcagggagggcttcctggaggagagcctcaaagggagagtcaattaaacagaaggaaagagggaggccatttgcacagtgagttggaagaaggaagctcaagtctctgattccagctttattccctcccctctccctacaccacacgcacaagcactcctttactaaagacacttcacagtgggaagattcagtctccgttaccgtctgacacacacacagcgttttacaaagcatgggtgcattcgcgatctctcatgagatttaaacaaccctgctagagaaaagtgaagtggacattttatttcagtaaacgtttatgaagcgtctactctgtgccaggcactaaacgtttatgaagcgtctactctgtgccaggcacaggcacaagaagtctcagttcttgggagtgccataatcaggaatggacaaacaatgatcagatctggctttgcgccagtgtcacgggaatagggaggaaggaagggtaggcgtgggggtcaggacaggatgcaggaggaactggtgcttaggtgagcgaaggatgggtgggagttcacaaggcagacaaaaggcagagcagcactccaggcagaggaacagctcaggagaaggcccagacggcaggcttcctgggaacctggaatgcagagtgctgggaaagcacagatgaagcatgagtctagaagggaaagcgagaggttataaagcacctggaacaccagcccacagggtttgactttagagatgatggggagccgttgaaggtccaggagtcaggcagtgaagtgattagatctgtttgagagtgatatctgacaactgccccattttaaatgaggtaaccaaggcccagagaggttgggtgagttgtccaaagccacacagctaactagcttcagtccctagagcagagttgatagaactctaatgggttttatactcattgtcacccctccccaccatgcctttccctaccctctactctcttcctctcccttctgcccaggatgaccccttctcagctctggatatccatctgagtgaccacttaatgcaggccggcatccttgagctgctccgggacgacaagaggacagtggtcttagtgacccacaagctacagtacctgccccatgcagactgggtgagggggaacaagggggtcaggctatagggggcagggctggggaggctgtcaggcatcttggcaggaaccaatccgttgtcttggtagcaactgctgagggccacaaagcataagagaccagcactggatggctttatgcatgctgggcatttcagggagaccctgtacaggccaggggtttggtatcacctagacccacagacactccccatcctggcccgggccccccatggtacactcaaggctggcaccaagaagtctcaggaataatcaagtgctcacttctcaccttctgattcctgcccttttgatgacccatccccgcagtcatggggagtgcccatttggatggaaaagccctcttcccaccctatgaccttcccggggtggatggatgcaccaccccgggaatcatatgggaaatatggaaccaaacaatagcagtagtaatagaaacttcaggctgggcgcaggggctcacacctgtaatcccagcactttgggaggccaggacaagaggatcacttgagcccagaagtttaaggctgctgtgaaccatgatcatgccactgcactccactacagcctgggcgacagagccttgtctctgaaaatttgaaaaaggaaagaaagaaagaaagaaacttcaatattatcagtagagtccaatgttgtgaaacccctcattaactaaatttccatactcttcagtaggtagaaaataattactttttgattcattagaaagcacttaatttttaagatggagatcatgtaattttgaactctaggtcttgcctactcctatataaattctcctctaaacaacagccaaaattgaggccctctttgagcttcaggctggtgccaaatggctctgcttattttccccaaaataaatcttccttccatgtatgatgagaccccctccagtataaagaagacccaaagaaaatcacccaaagaaaaaaggcccaaagataagacccaaagacctaaagatttaaatatatatacagatacagaaggtttgtttctgagtttctgtagtgaccttggcaataccttgtagttcaggacaatcctgaggaacacagaagtgctggcttccttgaggaatcagtgatcaggactctcgagccccttgaaccccagcatagggcgggagggggtgagggcagcaggggtgggtgtctgaattaatgtcaggtctacgtgatggtgtcatcaagtgttccagataaaaagttttattgagccgggcgcggtggctaatgcctgtaatcccagcaccttgggaggccaaggcgggtggattgcttgagcccaggagttcgagaccagcttggggcaacatggtgaaaccctatctctataaaaaaaaaaaaaaaaattagccaggtatggtggcgtgcacctgtggtcccagctactcaggaggctgaggcaggaggatggcttgagccaggaagcagagattgcagtgagctgagatggtgccattgcaccccagcctaggcaacagagtgagaccctgtctcaaaaaaaaaaaaaaaaaaagatttattgattccaaagaggcatggccacacacacttagaccagcaggtgctttgctaagccctgatggaggctgccagacccgccgtcaagaggagctaagggtagtgtacaatgagcccacttagtgtatgacggccgctgccgtgggtggagtccttgtgagtaaccagccagcttgagcaggatgcactaatttgctctgcaaacccagccattgagaaatacgcctcagatgtaccgaactctaggtcctaggagtatgttggttggggtaggttatcaataccagcccacttgcagtggatgagctggtggccatttgtagtgaggaaagggatgtgtcaacctccatcttagactccacaattgagggatgtgaccaccattcctccccagccagcccccaaaccacgtttgttgctgcctttccagatcattgccatgaaggatggcaccatccagagggagggtaccctcaaggacttccagaggtctgaatgccagctctttgagcactggaagaccctcatgaaccgacaggaccaagagctggagaaggtgggtatatccagggatggccaagcagccacccctggatgcaaaggttctgctagaacctgaactcataaaggtcttcctgtccttagtgccccaggaagccccctaaagggcagatgtgggagctgggcatgaactggctcctaccagaggagagacagtacctgtgccaggtgcccagggcagaatcaggtgggcaccttcgccttatcctgaggtagtcagatactatttagttgcaaagtttcagaaaatcaactcaaactggcaaagaaaactaagcaaagaaaacaagagggaattaaggatttattgacccatgaaaccaaaaagtccaggtgtgtcatagctttaagtgtgctggatccaggtagtcagtgtaatcagaaatctgtttctcccatctcttgactctgctcccctcaaattggctcagctcccctcaaattggctccattctcatggtatcagtgagggccaccagcagtcttaggtttacattctcccagctcaacaactctgccagaaaaaaagtgcctctttccccatagttcagcaaaagtcccagggctgagtctcactggtccagtttggtcatgtgcccacccctgaacaaatcactgtggccagcggtgtggaatgtgaggattggcctgtcctgggtcacgtgccactttgggagccagatccacctgaatcacagagactaaaaacaggggaagagtggttccccacagggatatgggggtgctattatctgatgaaggggaaggactaaatcctggcaagatgaatgtgtgtctgtctgcccctccctcaggcagggacaaagtagaaatctgacattggtcatcaccagagtagttaccccttaacttccccttcccccaccaaccatatatcctgaagacattgcccaggccacatctgtcttttaggagactgtcacagagagaaaagccacagagccaccccagggcctatctcgtgccatgtcctcgagggatggccttctgcaggatgaggaagaggaggaaggtacaggcaatgggactgggagtgaaattatggcctgaggtctgatcagccacagagaggctaaggtttggggttctgggtgtggtgcagtagtgtgcctttgattaaatggcttccctctgtgtgcccccgttgtcccctcagtaagtggggataaaatgccctgattcaccctcagagggatggaaatgtgtagccacagagtgggttcttgcggcctgcagaggaggcagctgagagcgaggaggatgacaacctgtcgtccatgctgcaccagcgtgctgagatcccatggcgagcctgcgccaagtacctgtcctccgccggcatcctgctcctgtcgttgctggtcttctcacagctgctcaagcacatggtcctggtggccatcgactactggctggccaagtggaccgacagcgccctgaccctgacccctgcagccaggaactgctccctcagccaggtgtgactggcggcccatggcagaggttgggagtggggatgggggaagggctgagcccatgggcaccctggaactccaaatcactctctgcctgtgaaggagtgcaccctcgaccagactgtctatgccatggtgttcacggtgctctgcagcctgggcattgtgctgtgcctcgtcacgtctgtcactgtggagtggacagggctgaaggtggccaagagactgcaccgcagcctgctaaaccggatcatcctagcccccatgaggtacccgtctcccctggccaggctgggactgtgagcaagtcactgttctctgagccttagtcttcccatctataaaatggggatatacaacctgtcacaagcttgtgggggtgactcaaggagacagtgtgtgtaaaagtgccctccttgtgcaagaagcagggagaaactggcatttactcagccagatactgtgataggcattgtgtgtggttagctcatttaattgttaccatggccctttaaagtgagcgtctgcacatccaagtaaagattgttttctcctccctaagtgggtgtaatttgcccatccccacccatgagttcagctccctgccctcccctcactctctctccctcagccagcctcaggttttgacactgggggaacaggtagctgttctattaataatttcctgtaatgggatggataaaaatctcaaaggccacttgatgtcaaagaggtttaaagttgtccctgcccaattggttggccaacttggcttaaaaacacaacaggcaaacagattttctggccccttgtcgaggctagacctcacaatctaactgcactttttactttccagcctcatgagttttctgtggcccacagatatggcctccaagtttatttacttttactctctatttgccccagctctgtagttctgaaactccctggttggggttgggctgactctgggtcagccagccggcaggctgtccccagggccctgttcctcttggcaggttgtccctctggagaggactctgtgtcccaggaggacagctgctgagtcaggccgagccggcagctgagaaaggcggcagtcgtcagatgggcttgagaaactgaaaggctaacgaaaggccagcgcccctttgggcagctgcaggaattcacggggatacaggccagatgtctacaaattggcagaggatgccagacccatgaatgactccagagacacttacatgaaataattaactatctcattcagtaaacaggaagtaaatcaatggacaaatgagtaactcttcctctggctgcctcttaggttttttgagaccacgccccttgggagcatcctgaacagattttcatctgactgtaacaccatcgaccaggtacagaggaccgtgccacactatccccccttccagagacacctcggacccctgggggcttctcctgtctgaggctgggttccccagatcaggtgatcacagccctctgggaagaagccagtgtccccgatccgattataatgctgcttcagggctggggcctccctcgtgggagcctcacagtaaggctgagggaaaccagatccctttagcttccacctgagatcccactggctttctctagtaaagttccagcatattctgaaccaaggtggctgattgtatggagaatattcattttgattcagcctgtgttctttatttaccattgtaccagatggtgtgaaaacaaaatcttgattcctacctcagggagtttaccttgtagctggagagatgagatacgtgcctataataaagggagagcaaggccgggctcagtggctcactcctgtaaccccagcactttgggaggcggaggcaggcggatcacttgaggccaggtgttcaagaccagcctgatggccaacatgatgaaaccccttctctattaaaaatacaaaaattagccaggtgtggtggcaggtgcctgtaatcccaactacttgggaagctgaggcaggagaatcatttgaacccaaggggcagaggctgccgtgaaccgagattacgctgctgcactcaagtctgggcaacagtgagactcagtctcaaaaaaataaaggatcaaaaaataaagtgagagcaaaacatggcggccagtagcactctaaacacagtcaataccaaaattcacctcactctctccccctcgtctccctcagcacatcccatccacgctggagtgcctgagccgctccaccctgctctgtgtctcagccctggccgtcatctcctatgtcacacctgtgttcctcgtggccctcttgcccctggccatcgtgtgctacttcatccagaagtacttccgggtggcgtccaggtgatggcctcaggggtgaggggtgggaggtgctttgcaatgtgcagtttggtgtacttgctagactcatcgttatgagagtaatagggtcgtgttccctccaaaaaataaaaacaaaaaacagaaatgaaggaaatagaaatatccacatcttattccaccgccctaatataatagtctgccaacacacgcacacactgaggttgacatctgaattatttccttgggcgatatggtcaggactggaattgctaggtcatgataaatgcacattttatgcccttcattcattttgccaacatgcttcccaggagggttgcatcattctagtggtcaggctgattgctgatgcatgaaatcggcgggcacctgattcaagcagtgttatgataacacctcccagcccacgtgagtccagagtgtagctgtaagccttgacttgagggagcctctcacagccattctcatggatcacatttgccctcatgagctttggatccatgcacgcctctttcctcctcaaaattttctaagaatgttctctagggagttctttctgggagtgattctcccagattcatagaaactcatagattcaaaaaattgtaggaaaaaatttaaagaacgtctaggccagtgtttctcaaactgccaattacagcccatcagtgggtcatgaaatcaatatcatggatcacaaccagcatttttttaaaaatgaaaaaaacatcagactgtattcatagagtaaagcaagctttgcttcatgaaacctttgtgttggtcatggaggtgtgtgagtactgatttgtgagataaaatatatttctgactgcaggttgtggtcagaaaggttaagtacctttcccaagtgcacatagttggctagaaactagagttgagatacttattagcaataataaaatttagatgcattttggacacaattacctgccccaaaggatcaacatttgtataaatggctttttgcttggatgatccagaatggcccgacacccacacgaacaacatagctttttgacactcaaaaaattcaaagtgctgcacaagctgttctacaaagttcatttcttctgccagagaaacagcccagtctctgtggcacccagtctgaccctggagatggtttatcagggaaatcaacttcctgcatcccaaactggcctccctggcactgatgtgcttgtcgaggtgcagctttggggagcaggaggcaattctgttgccatggaaacctctggccttaccccgagacgaaacctatcatttcagcacatcactggccagggtctaaagagctccttgatggggtaagcggaagacggggttgaacgctttgagtttggtcttctgttcctttggccagctgtctcaaggttcagattgttcacctgtaaaatggaactagcactgcctgcccagccttagctcagctccaggctgtgcagcagaagtacagggacagatggcgacctggggttgacaatgcccaggacagcagtaattgtgccccacatcaggctgtgtctaagcattgtacataaacgatctcattcagtgctcacaaaagctcaatgggctggtggcattgtcttcccccttcacggggtaagaagctgaggcctagagaggtaaggccattcacccacacagcggtagcaggtggagctaggcttcaggcccaggccgagccctgagcctgccctcttaactgttccactctgttccccgccacagggacctgcagcagctggatgacaccacccagcttccacttctctcacactttgccgaaaccgtagaaggactcaccaccatccgggccttcaggtacgagtccacattcccccaaggtaggagtggaacaggggtggggccagggggcacaggccatgagatttgattctcaggactccacttgggaaggccaaggacacgttctctctcaagctgcctcaggtcccaaggcccaagggatatccaccagcagggacaggccaggtgggctcccactgaatgttctagagaggaaaattccagctctgtagacaagcccaggacctctgtgaggcagagcatgaaaagagacaaagctgggacaagtcttcatgtatcaacgctagaaagggccttaggtgcgggccaccctaagcccttcttttattaaggagcccctgtgtgccaaacactatgctgagtactgtacaggccaatcccactcattctgcactgcaaccctcggtgctgagaatggtcatttccattgcacagacaaggaaactgaggcacagagacgttctataacctctctgtgtaaggtgccacaaagcccagacttgaacctatttgttcatgcaacaaacatttactaagccccgactatgtgctaagccccatgccaggcactaaaaagatgagtcaaataagccgctgccctgcaggcgtttacagcccagactttgagcaggccaggataaatccacgtgacaagtattctgaaaaaagcggattcaagggctgtgggagcatagaagagagacagtccgggaaggtttttgtaccagaggtgtcatcagaactaggactcaaaggaggggcaggagttcaccaggctgaggaattcctgaaaacttcagtgcccctgccatcgtctcactaccctgagtggtgatgttggggtggacaggagcatctgaggttgcctggggaatgagggaagctgttgtttcccactccccaagagtctgtctgatctccagaggcatctctcttccagtcaggcaggccagagacccctgacacacaaagttgggctcttttctcatcttcatccagagagtgataataggttatttttagggtggcacagctgcacgaagtatgacagtaaccatgagacaccaagcactgtgtccaggagtaaccatagggcacaaggaccagccaagggccagagaggcttacatctcctccccccaacccctgaagtccagcttcagccctggagaggtatccaggcccctctgcccaccctggagcacctagggccagtggaaatccacctcttagggatcttgtctaagtaaagaagagcagagcaaagctctgccctggccttggcgctgctccctggacatcccttgcccctggacaagcctatgctgtgtcttccacaaagaagcttgctggggactggattatgactctagagtctcctcccagcctcctcttctcaagcctgaacttctcccgttccttcaacttccaggtccctcgacattactgagcctagcctttgctctaagttttggtgatttccctctctcaattggtgtctcagagggccctggggtagagagatggtgactcttctagagtgggccacagccccttgtgtgcagatcccagcttcctgtaaacagcctcagatcaggccaaacctgtggtcagccagagccactgctacccagtgaggtcttccacaccctactgacacggtgaatgatttttaaatttgaatgaaaggctttttaatcaaccccatacacatttaatgcattggctttaatccagcagcctgttgagagctattagcacttattgattgcccacttactgtatgccaggcaccgtgctaagtgttgtatgtgcattattacatttaatcctcacaaggaccacataacataggtacgaatcgccacattctccagatgcagaagcgagacccagagaggctgggtaatcaatccaaggtcacacagactgcgggggctggcgctgagcttggaacccaggtttgcctgaccttctgggctttcctaagagatcttattttttcccaaaagagtttcaagagtgcccagcactgggctcagtggcgggctcggaggttgttttcgttcatgtaggaactatcacttccccatttttttcataagaaaactgagtctcagtcctgatacacagccaggaagttgtgatgttcaggctccaacctgggtttacatggctccgaggctggggctcttttctagtcctcagacacactgtcgcacgcctgtggcagaagctcccatctcacacttgccgaccctcaactcacacagtcctgagacccacatacgctgagcgcctcacactcctataacacgcacatgccctgatgcacacacattttcaacacgcacttactctacccttcaggcatggtttcacactcactgcagacacgtcaccctcccacacgtctccaccctgggggtgtgcagtagcatgctctctcccacctcagaacctcccttcagtcccctcagacacatgccctctctccacgcagagacaatcaaagctgaactaacaccttccagggtgaaaagcaaatgcccagtaaggtacgtcttgggtgcctccgtgtcccctgagtttggtcctatcaaaccagcgatgatgaggcagcttttctttcgttccttcctccatcatcaaacaagtgctcctgcatctcctctgggccgggcctacgtcagcaaggtctgagggaagcggccaaggagagtgatgacggcagcccaggttgatcagagaaaggaggcaggtccatgcgcagtaactcagggaaaacatgatgaggacctaaggatgagaaagaagcctccagagttccctgtgcagagagattccatcaatttcagagggtcaggggagtgccatgcattcatccaacaaatatttattgatagtgccaggtgctggggtatattggtgaataaaacatcttcatggaatttgcagtctattgagggagatgattataaatagctagagaaatgcatgtacagcagatactgtggagcaaacaggttgcagacaataataggggaaacctactttatagtaaggtagtagccaggaagagcctctctgaggaggcagcatttaaggcaagccctgaaggttgagttgagccagccttatgaagagcaagggcaaaagccttccaggaaaagggaatagtgtgtgcaaaggccctggggtagggaagactttagtattgtcacagagcttttaaaaagctgagtggctgcagcatagtgtgtggggtgtttgtggcaggaattaggttggcaggagggggttcttcatcctataagcagtggaaggtcattaatattcttttttatttgtttttttttttttttttttttttttttttgaggcagagtctcactttgtcacccaggctggagtgcagtgaggtgatcttggctcactgcaacctccacctcccgggttcaagcaattatcctggcttcctcagcctcccaagtagctgggattacaggtgtgcaccaccatgcccagctactaatttttgtattattagtagagacagaattccaccatgttggccaggctggtcttgaactcttgacctcaggtgatccgcccgcctcagcctcccaaagtgctgggattacaggggtgagtcaccgcatccggccggagatcattaatattctaaacagtgggggagaggacacagtttgcgatttagatagattaagccagccactgtgtggagcatggactgtagggagacagcaggtagacgtattcaggaagctgatgcagtagtccaggtgagagtttgtggtgggcaggaagcaggatagagggggagggaggcaaggactcttttagagagagacataagaggacttgccaaggggctgaatgtgaatccaggtgattcctgggtgagaaactgggtaaagggaggtgccccttattataatgggaaagacctagagaaaatggatcttggggtgaaaacaagagtttggaggaggtggggattctggacaggtttgaataagcagaaaggagtggggtggacattccagagagggatagcttacatgaagtggccacggtggcatgtctggggactggaggggccctggagcctccctctgcaggtagggagactcctaggagctatgtggaccaacactgttcccttaggagcttctcatcctccctccaggtatgaggcccggttccagcagaagcttctcgaatacacagactccaacaacattgcttccctcttcctcacagctgccaacagatggctggaagtccgaatggcaagtgctattcccctctaccctggcctctgataggagggtggggccagagcaagagcacacaggtacctggggatgaaagagaggataggataccagatcgtgtggacaccaagccttcctgcttcccccagccctggtggtcctcctagtgtctagcctgtgctccttttccccatatcactgcctggaggcttgtgtatctgaggtgtgtgccagtggcaagaacagttgtggtgaatgtgtatctgcagtgggtcatatgacacccacattgtgtgtgtttgtgggccagctgaggcgtgcatgttaaagggtgtgcaggggctagggggtaggggagcatgagcttgtgggacatgttggctcctggggctccagccttcgcagcccttgtgtgtgtctggtgacgtgtgcatgagttgcagggctggagtggaggcctggctgagctgctctctgccccgaaaaggagtgaggtagaacaggggcctgtggctctaacccctgagcgcccaggtcagctcctctccctccccaggagtacatcggtgcatgtgtggtgctcatcgcagcggtgacctccatctccaactccctgcacagggagctctctgctggcctggtgggcctgggccttacctacgccctaatggtgagcggcagtgggctagggcagaggaggggtcagacaccagcactcccggagcaccttcgtcactggagacatgagacactcccaggccttaccccaatttcatttgcatctgatgccagagggacagtgcgggcaggaaggctgaccagcaggccccagggcccaggccccagacaggtggaggttggggagccacatgactgaccctccctgtgcctccagggagggctgctctgagcaggcagtggatggcagcaaaaggaatctggggccctggcccctctccagccttaagaagagccattctggtggctgaggacagaactaagcgaccatggagtgtgcgccactggcttgctccccacaggtctccaactacctcaactggatggtgaggaacctggcagacatggagctccagctgggggctgtgaagcgcatccatgggctcctgaaaaccgaggcagagagctacgaggggctcctgggtgagaggctcagggagaggggtggggaagagtccaaggaggagtgtgtctgggttgggggccacaagggagcctggggatggggtggcactttcggatactagctgtggcccatgcctggtggctgagcccagcccggcccccagcaccatcgctgatcccaaagaactggccagaccaagggaagatccagatccagaacctgagcgtgcgctacgacagctccctgaagccggtgctgaagcacgtcaatgccctcatcgcccctggacagaaggtcagagcacgggcccaacccaatgctgcaggacaggcgtgagcaggggatggggcatgcacggagctggatggcttcgcagtcacctcgtggccctccagggccgaggcctctcactattcagacatcgcagtctcctgccctgggcctgtgggggcccatctttcctctccttctattgccttcccccagtgctgccctcaggccttgtcttctcactcatccaccaaggagaccgacactctggactcccccagctcacacgggctttgtcagggcctccctctctgcgaatggtcaggggctttccctagggcactgccccgagcttcagggcagggacctgggggcagacagcgaggccacccttgtattgagggtgagcccctgcctatggccctggcccagctctcctctcgtttcccactctgtctctttgtctctgtctcactttgctgtggctgtccatgtcattctctgaccttgggatgtacctctgtccctgcctctctcatccttctatgtcactatctgtctccgtattgtaatttctgttggtacccaagtgccaggaagcaacgggatcagaggtggctccattgtagggcggggcacacagacacatccatgcataccactctcagctgcccctgtgtcctcctgccacacccatgcccatagagacacaccactgccccccagctctccttcagccaagtacccggcacacccagacccacaccaaggcccaggcaaatggacatccatgcctgcacttgcgtgccggtccctgtgtaagccctctctggacccactgcaggaaacaagcccaaacctgtggtgtccaaagagaaactagtcagaaaaccaggccaaaaagataccctgtgacctcccacacctgcacacacacccagagctagcatagaggctattcccagcagccccagagtcccagtggcggtgcctgcttctctctttccagatcgggatctgcggccgcaccggcagtgggaagtcctccttctctcttgccttcttccgcatggtggacacgttcgaaggtgagttgtaaggcgggcaccccacgtgtacccacagccaccagatgaggcctcagccctggcacgtggtcagacatgacaggaggcccagcagtcaccgccttcccctgcaccctcactgggacccatgcagggcacatcatcattgatggcattgacatcgccaaactgccgctgcacaccctgcgctcacgcctctccatcatcctgcaggaccccgtcctcttcagcggcaccatccggtgagccccaccacccctcaggcccacccagccccaggccggctcagttccatcagatctggagcacaaagaggagggggttgggggagaccaggatcccagaggtgtttcctgctcatgcccttctccatcccatcaggcccaggcagcctctggaaggggatcccccacccatgggtctaagatgctgtcccccacccactgccaccacctcggtgcttctcccagccagacctccaactcagtctgctctcgctcactgccctctttgccgcctggggatgcaggcaggaccctgctccctccctactggggctttctgtgccacttccagatttaacctggaccctgagaggaagtgctcagatagcacactgtgggaggccctggaaatcgcccagctgaagctggtggtgaaggcactgccaggaggcctcggtaactactcctggctatgcagctgggttggttgggcactcaaggaccctgtaaggatggcagacagaagcccgtgtctcaggtttgccccaagtttggagtctgaagcctggcaggaccatttagtcctacttctcactatacgggggcccagagaggtcaggtgtcttgccccaggtcacacaactggtcagttcagggtctggctcctcctgcagggtacagcgggtacagtcagggatccttgtgagacagagattgcgagtcccccatgccaagggggcatcttcagccctgccctgccccatccacctgcatgcccagttctgccttaggggaggagaagatggactgggcaatcatagacacgggtcactcatcaaggccaccggtgattggcaaagccttggtatatttgctgcagctcctggagcattgggggtggccaagccttggtttcaatgaatcaccctaccaaggccctacatacacactcagtgcacccctcagtgcacacgccccctcccagaactgcccagggccacagcagcacacacctccaggggtgcccttctcgttgcagtccttgcagacggcctccacattgttgtgtcaggtgcaccagccctgcacacgcctgtgctcttggacacacacccacctatttgcccccatgcacacattttccaacagccccccaagccatcccatctgctccactcacagcacaagattaactcagtcctacttcatctccccgggctgttttcagatgccatcatcacagaaggcggggagaatttcagccagggacagaggcagctgttctgcctggcccgggccttcgtgaggaagaccagcatcttcatcatggacgaggccacggcttccattgacatggccacggttggtcctgggcccctccatgggaccatggtcttggaaagggtttagtgggatgctagggagaaatttgcacgaagtagtcctgaggctcaagttgcctctaacatcaaatgctatgtgttgcagaaaatgaaaagagctggggggaccctgactctgtctagtcttagggaatgttacacacacacacgcacacacaaaaacactatgcaaacacacacataagctgcacacacagacccacacagacttcacactgtcacctatcacaacagcacacacacagccacaaccacaacctacatacacacacagagctgagctcccaacaggctgagtccagtccctgagtgccgggaacctgttcagtcctgtggggtgggggtgggactaggatcggggtcagatgggagctgagccacagacctgggctccacatcccccaagccaggccagaccccatccactgggcaggtgagccaacagctgttgcccccacttggcaggaaaacatcctccaaaaggtggtgatgacagccttcgcagaccgcactgtggtcaccatcgcggtaaggggcccattgatggggtgcagagggacacccagggacaggactggcctgttgtggccgtcatcagtgcacagcccctgggcttgcctggtcccagtaatcaagaaagaaccctgaagcaggcagttcagggcaaggggcctggagggcatgcagggagcctgggttgcaggatttggggtggggggttttgcccctgtgcttccctcagacctcccctctccttctccaggttccaaggcctgcccctgtcccaaggccttatatgttaggctggcgttacttctccataggaagtgggggaggggttgtggagggtctctgagccttgaagcctggaggtggggtagagttgggacttggagaggagagaagggtggtattagcagatggagagcttgtagtcacatccaccccaggaaagtgcagtccccacagtgacaggacattctggccacatgcctcatcctcctcctccaagccgcaggagggccaccctcagctgtggcccccaccgcgggtggtattcccaccatcctgacccgccccctcctgccctgcccagcatcgagtgcacaccatcctgagtgcagacctggtgatcgtcctgaagcggggtgccatccttgagttcgataagccagagaagctgctcagccggaaggacagcgtcttcgcctccttcgtccgtgcagacaagtgacctgccagagcccaagtgccatcccacattcggaccctgcccatacccctgcctgggttttctaactgtaaatcacttgtaaataaatagatttgattatttcctactagaggccctaagtctggtgggcaggggctggcggtggatggtgggttcagtagaaccagcctggctctgacatcaggcagaagctgtgtgagcaaaagcctgcttccttacctgtgaaatgaggcctctattagtcagccaggctgccacaacaacatatcacagactgggtggctttaaaacagacttttttctcacagttctggaggctgaagtctgggatcaaggtgttggcaggtttggtttctcctgaggcctctctccttggcttgcagagggctgccttctggctgtgtgctcacatgacctttactctgtgcacatgcatccctgctttctctctgtgtcttaaaaggacaccagtcatattggattagggccccac

SEQ ID NO: 3 - DNA, 138742 bp, Homo sapiens
  source 1..138742: mol_type = genomic DNA; note = APC_gene
gcattgtagtcttcccacctcccacaagatggcggagggcaagtagcaagggggcggggtgtggccgccggaagcctagccgctgctcgggggggacctgcgggctcaggcccgggagctgcggaccgaggttggctcgatgctgttcccaggtactgttgttggctgttggtgaggaaggtgaagcactcagttgccttctcgggcctcggcgccccctatgtacgcctccctgggctcgggtccggtcgcccctttgcccgcttctgtaccaccctcagttctcgggtcctggagcaccggcggcagcaggagctgcgtccggcaggagacgaagagcccgggcggcgctcgtacttctggccactgggcgagcgtctggcaggtgagtgaggctgcaggcattgacgtctcctcccggcaaagcttcctcggctttgccccgccgctgctcgggaccctacggtgctcggcccgactctgtggctctcttctctccatgtctcaccctctcccctccccgcactccccattcaggcctccagttggcccctggctttgcaggtcctccattctcacgcagtggatgggggtcgcgacgcccgccgtcctccacctttcctggctgctgctggagcttcgcccctgcaagtggtgccccattcgcgttaggtgggtgggtcgtccgcccttcccattttagtcgcttccccatcttcctcgtttggaccctcttgcttcctctaaaagttttaaactctctgcctgggaaaatacctgatagcccggcatgtggagttacaaagaaagggctgttatccaaaggccggtgaattttgttcactttgatgggagaatcaagtccccaggagccttggatggttaggtcagagtctgactccttgacccaccaagtagaggaatggtgcctctgttggcaaatgattgttcatctaaatcattcatttttttcggctgtaggaaatctttggtctctgaactgttgaggtgggggcgtgagctttctagatctagtgaaagaattggaaactgttatattcgttttaaaaaagaagaccttatgcagtacatgtaagacatcacttaatggtacaagcaaggataagtgatttattcttttattcagtgttagcttaaattgcctactgacgtcttagaattccatgttgtacaagccctttgtttctatttagaaaggactaaaatggagaaaagctttttaagttcaaaacttcttaaattgcttgtattctcgattgttgttactgttcaaccctccttaggagtacttgatattttctatatgatttagtcttgtgccagtctcagtactccctcctttattagtggagcaagggtagtcagaattactggtgtaaaaaactgtcctaaataacgtagtaccttgccagagtctaagtgcaaaatgtgggatcaaagcggtagtggaggaagttgccatggctaatttttccatctttccctggatggaagggttggataacgtgtcaagagccccaaaattgtagaagtgagattaaaaatataaatgatagcttgccctttgaaattgcaaatgggtggaccttttttattaacattaaattgagcaatatcgttttcttgaagttatgctagatgttctccaaagttgttaagcacaaactatgcctgctgtattagaattgtatgttaaaaatttttaacgtgtgggttataaatagcctggcagatttgtttacttttcattctgtctcataacacataatctatttttccctttactgtggacttttgaccttttaatgcatttttaaaatttagagatagaattgttcagcttaaaagaaggaggaatatttttatgtttgcttcttgtatgggctagttcattcgttgctagccttcacttttctggaaccagagcctgtgtgtttttagagctggttgtctctgaattctctgcatacagtttgaaggggcagtagcaaagcaggggttgctgagccccaatcagtggctcactgcttctggcaaaatgatttgtagctctgtatcaaaaaacatctgaccacaaactctttaaaacctctcactttggcagggtgtggtggctcatgcctgtaattccagcactttgggagaggccaaagcgcatggatcgcatgagtccaggagttcgagaccagcctaggcaacatggcaaagcctcatctgtacaaaaaaaaatacaaaaataagccaggcatggtggtgcatgcctgtgattccagctacttgggaggctgaggcaggaggattgttggagcccgggatgtggaggttgcagtgagccaagattgtgccattgcactccagtctgggtgacagtaagaccctgtctcctaacaaacaaacaaaccctctcactcttccactcttatggaatttggtattttttcctttctctctctctttctctttgtgaaccttctttgtctccctgttcttccaacccattaccctaatgctgatttcatttgcctccctgtgtaaccaggatcccatgatcatcagcttttactaagctcctattgatggcctagaatgcttcactttctgtagacttacctttctagtccccaatcctaaataagcctcgctagctttaccagtttgacccctgaaattctgagggacatcagagacagctatgtgaggatattggtcagtttttatgccagttggtgctctctgctgggtctctagtgttgtgttccttttcttctcatttcctcaggtttttatagcaaataacttaatctcttcctttgctgagaaaaatctcaaccatctgaggtatatttccacttcacttttttcatctcagtgtcatctctttatatatatatatctcagaggaagaaatgaccttctttcttttcaagagcaaccccctccctccagatgtgtccatgtaccctttcccatctttctttctctagaaactgtccattttcacttcctgtccaccttcttcagcctctccctctctagcctacatagatgcttgtatcttctgccatataagtgtgtgtgctgttcaactctaggaggacgttctaaagcttgagtctgctatgccactgtatttctattcttttctttaaagacttattctttcatcccaggaagctgttatagtaggaagaacattgacttttgagcaagatagaacttttgatctgggtttttgaagtcttttaaaaccactttagtagctgtgtaactgtgggtatgttactattcagatttcattctgtatctataaaatatgttatacttagctcacagggtggtggttaaagaaattaatacatgttaaatgtccatccaagtgtttggtacattgtagagttcttactaaatgcttctgtgctttgcactcgtactgcctttaccatttcaccactgaaactactgttttaaaagttatctgtgacctccgaatcaccaaatccaatgacgtttcctctgtcatccttggtttccttagacccaggggtccccaaaccccaggctgcagacaggtatcagtccttggcttgtttggtgttaggaactgggcagcatagcaggaggtgagcagcaggggagcaagcattaccacctgagctccacctcctggcagatcagtggcggcattagattctcatagtagtgccaaccttgttttgaactgcacatgcaagggatcagggttgcatgttctttatgagaatctaactaatgcctgatgatctgaggtggaacattttcatcctgaaaccatcccccacccaactcctgtcccatggaaaaattgtcttccacaaaaccattccctggtgccaaaaaggttggggactgctgccttagatcagttgtgaaatatactgtcttctgtagtcataaaacgatctagatttcttggcttttctgcattatacttcctgattctgtatttctcaggaagtttcttcacattttccttttatcagttaggctgcaaatgggatttaaaaatgaaagataagctgggccatggtgtctcacacctgtaatcccagcagttttggaaggcccaagtgggaggattgcttgaggggcggagttcaaggctgcagtgagctatgattgggccactgcacttcagtctgggtgacagaacgagaccccatctcaaaaaaacaaaaaaacccaaagagatgttttggctcttgcaattggcaagtacatagatagaagtggcttgaagagtgctttgtcatgtcatcagggctaagctcccatttatctgctgttctctcaacattgtccttgtgtttgggctttagacttcccttctaataaaaaaaaaattgccaccaatgatgttcatattatagccccttcatttatttccaaagaaagagagaaggccacttctcctagccttttcccaagaatcctaagctctagtttgattaaacaaacatagatcatgctgccaaacctgtaacaatatctttgtctagagggatggaattatcctaagtggcttagccagtggagtgaatcttacctgaaaatagagactgcaacacaatacggggaaggggtggatcctggggaagtaaccagtgtcctcaaggttccatatgcttttcactgtgttctcttggtgatcatatcctttatgatataaaccatcatttctgtggggctgtttcttggttctgtaactccctacttccatttcctcctgtatatgtctatcttatatatactaccctaagtttaactcatactaaactgagtcagtttgatctcttcaccaaccctcacctagtgtgtgtgtgcacatatatgttttgttgtttgtgagaccgacggggtttcactctgccacccagactggcatgtagtggcataatcacaactcactgtaacctagacctctcaggctcaagcagtcctcccatctcagcccttagcctcctgagtaactaggactacaggtgtgcatcaccacacccagcccttttttttttttttttaagcgaccggggcttgctgtattccccaggctggtgtcaaactcctgggctcaagtgatccacctgggattctcaaagtgctgggactgcaggcatgagccactgcacccagcagcatgtgcgcgtttgtattcctcttcccccgatttctcttttctaactacctctctctcaacaacccagtcttgaaatctttcagaaatcttggttcttctcccactgtcaatcacgtgtcagatcttgaatatatcttgtttagttaggcccccaagttgtataatacccagttaacattgatttaaacagtatctcgggctaggcgctgtggctcacgcctgtaatcccagcacttggggaggctgaggcgggcggatcacttgaggttaggagtttgagaccagcctggctaacatagtgaaaccccatctctactaaaaataaaaaaattagccgggtatggtggcaggcgcctgtaatccccactactcaggaggctgaggcaggagaatcacttgaacccaggaagtggaggttgcagtgagccaggattgcatcactgcactccagcctgggtgacagagcgagactccatagcaaaaaaaaaaaaaaaaccagtatctcacataaaaagtccagaaatggagtattccatggttagtttagctgtgctatgatttcatcaaggattcaggtgctttccatctttatgcttggctatccttagcatgcttaactttgggctcagactttgccatcatggttgcagatggctctgctccaggcatcacattctccaaagacaggtggaagtttgtcctttcatctcttaattaggcaactaaaccgttcacagaagccctctttccgatgtccatcctggcgtgccgctgctttaattacgaggaggctgggaaaatgaatatgtggcatttcagtctaggaagagggtaagcaaatggctgattagaagaaaacagatggtgtcaatgacagtattgtatggagaaatttaaataaataagaattttcagataatagtggcaaatttaaaacactgtttacaccaagagttaatataagctgtacataggatttcagtgtttattttctgagagagagtctcgttcagtcactcaggctggagtgcagtggcttgatctcagctcagtgcaacctctacctcttgggttcagcgattctcctgcctcagcctcccaagtagctggcgcctgccaccacacccagctaatttttgtatttttagtagagacagggtttcgcaatgttggctaggctggtcttgaactcctgacctcaagtgatccgcccaccttggcatcccaaagtgctgggattataggcgttagccaccgtgccgagcctatacgtaagattttgactgaacatttaaatagtcataggtgactggttaaaaatgaattattatgtaaaattagaatatttcagtggtatatcccagtttgtttaagactgtgttaagtacatttaagcatatctgttggagctactgcaagaaacaggtatgttatatgtaacaactattgaaatagagttgtggttccccttggggatgggagatgtttggaaatactatatggggacatttttggttgtcacagtgactgcgaggtactactcataattattaagtagaggccagatacactaatgtcctgtgatgtttggaatggtcccacaaaacagaattgtcctttcaaaaataccagtagtgcccctgcacatgtatacactgaagttagcaaatgctttgccttttgaaagaattcagagattgatctatattcttacattgcaagtgacagaaaacacaaaactggcttaaacaaaaaaagggactgagtacatcttctagtaaactttagctaagacttcatccagtggctcacatgaaaacatcaaggacttaatttctcttattcattctgctccattattccccatgatttggttttattcttgggctagcttatcttaatggtggtaaattactgtagtactttcagacttcatatcctcatttcacgtatagtaaaatgaaaaatattttgtatttgattttacaagtatttatttagtatcaccactactgaaactttccctaaacatctatccctaaaaagtttattatctcttctatcatgcttcagctttacaatctatatatcacactctatgggtattatttttctgtcccatgcattactctaccttgtcttaattattgtattcttaatgtctaaatgtctggaatactgtctggcatagtagtgtatgataactgtttatggaattagtgaatgattttgtgcttactacagaaaggaagaagcaagtatatataacatctattgaaatagagttgaggtaccccttggggatgggagatgtttagaaatttaagaacgcctcattccttcatcagttatttttgaatcctgaattatgtacattgtactcctaccactaaagcatgtatatgatgctcttgcagttgttataatagagtatgaattcgtttgaaagcgttactgaattctacttgtgtttttgtcattttctcaacaaaaccaaaaccaattattaattgaacaaatatttttgaagcctgctgtaggcagatagtgtggcaacattgagtgggaacaaaacagagcctgtgttgtctgagcttaaattttagtgggggacatagtcaataaatattatatatgtacacatacacacacacaaataacatcaggtagtatatagatcttgaaatagaataaaataggttcaggggacaggggatactactttagtttggtaagagaagggctttttgagaagccgtttgtgctaagagacctgagtgttcatgagtgaggtggcctgtaccattcttgtcgagatgtgaaatagaataaaatgaggtgcccatcatttttggttttggaagagtttgtgtatagttggaatgaattcttccttaaatatttgttataacatgtcagagaaaccacctgggctgggagttttcctgtggaaatgttttttaaaatttggtatttatttgtacatatttatggggtacatgttatattttgatacgtgtataaaatgtgtaatgatcaagtcggggtatttagagtacctgtcatcttgagcgtttatcatttctttgtgttgggaggaaaggtttttaattattaattcaatgtattgtttttaagcctattcaagtattctatcttgtgattattttttataatttttccactaagaattcttttatctaaaattttaaatttactggcatgaaattgtttataataaatattctgtggtccttttaatggctgcaggaaaagattcccttttcatatctgacgtaggttatttgtaccttttccttttccttattagtttcaccagagatcagtagtctttccagagaaccgtattttgaattttgctagtctgttgtatgtttattttctgttgcgttaatttctgcttcttatttccttccctgctgctttttggggttcttcggtgaagttcttgaattttcagcatttcttgtttttaaatatgttcataaagttaaacattcccctctaagcgccattttagctagttctattactagttttgatacatagtattttttggtacatagtatttttataattcacttaagatgttttcagatttctgttatgatttatactttgacttttggattatttggaagtattatatttttatttctaaacatatggagattttccagttattttgtttttaatttgtaaaattacaatgtaatccaagaacatactctgtttcaaaggcctgttatttcagacttaaaatttgagatctgtatatggcccagtatattgtcttttttttcctctccatttattgagtgcaggtctctgtattttttttattaggtcatatttgttaatcctgcatttcaaatcttaagtatcgtaggtgatcttttgtttgctcatcagttactaaaagtgtatgttaagatgctccattatgattgtggatttgagtatttcccttgtagttctctaatcttttataaatttgaggctatgctattagatgcatagaaatgtgtaatagctatatcttctcagtgactcaacattatcaagtttcctcttttattctggtagtacttgcacattaaagtctagtttgagatgaatataacaacgctagctttctctttattatagtttgatcttcttttactagttattctagaaattgctatctatcttataaaatctaatgttaatcaatacctttatcctattctcagatgatgcactttaattctacttacttgcagcccttctcatatagttatttttgtttgtttgtttgttgttgttgttgttttgagacagggtctcgctgtgttgcccaggctggagtgcagtagcgtgatcttggctcactgcaacctctgccttccaggttaaagcaattctcgtgcctcagcctcctgagtagctgggattacaggcatgtgccactacgcctgcctaatttttttgtactttgagtagatacggggtttcaccatgtttgctaggctggtcttgaagtcccggcctcccagaatgctgggattacaggtatgagccaccgtgcccagcccctactcatacagttttgttgtgcattttaattcattcttattttttctctttcttcctcattattgttgttgttactgtttcatactgccaatattttatttaagttaatgcatgtctttaccatctttttacttttcgtatgatcttgcacttaagattgctttctttgattttgaaggatctgaaacacaccctttagaatgtcctttagtctgcttgaaaatgtctttattttatctcagtcttaaaggatatttttgctaggtacagaattctaggttagcagtggttactttatttcagcacatttcattgttattgagacctcaactctttgtgtctcaacttttaagataatgtgattttgtttggctgcttttgagatttttatctttggctttggctttctgttttactaagctgtgattaggcatcggattctttgggctgtgtgaatatatggattggtgtcttatcagtcctggaagtttcttagccattattttttcaaatattgtctttgcttcatattctgtctcctgtcattttgggactagtttagtatgttaggccttcttatcctgtctcttacctcttttctttttctttttctttttctttttttttttttttttttttttttttttgcttctttttgacctcaaggcattgttctggatattgcttcagacttatcttcaaagttcacattttttttttcacctatgcctaatctgttattaactcattcagtaaatacctaatttaggttattttttagtatagaattcttatttggttcttttcaaaactgtatcactttttacagttttcaattttaagcaaaaatatttaagtgtggcctttatccccttgaatgtagtaagcatagttatttttcagtttgtgtctgataattccaatgttgggaagtctctaggaagctgattcagttgtgttgtagaaataaattgatgtatataatgtaagatgaagttaatctttctctaaagaaggttttcatttgctgtcaccaagtgcctgggggtgtgagaacatcttaatgaaatttcaaatctttaactttcctgggccacccagatgagttgaaactgacttcagtccatggtttccttctggttccttctttatttctaggttgcagccctttagggtctcagccggaagccaatgctgttttcactgcagtcctcacccttggtgggtctcagactctggctttggtcccctgtgcctgcaatgcaggcaacaaacaaccaagctcagcctcttaaatgcttctttgttggcaaactcacaaaaggcaaaagctggggtcacctttctgggttcctgacttctagtggatttgagcttcttattcattcctcgttattttgctggttatttggtgctgttaagatcattttactatcttatctagctttttaaattgtctttgtaaggatacttggtctgaataacctggtctgctgtttctacgagtgtaagtccaaatatttctttgactaacttgttcagaaagactggaaatttctacattagccattcctttgtgttagggctcctttgatggtgcaaattagatacctggaaaaggtagactttaagctatggttgccttttaattcctttaaagttaggttagttcctaggactttgcaaagccctaagggaaggagacagaggatattttgtatgaccggagaagcaaaaaatacttgtatgtgagtagtgccttagggtaggaattatgtaagcaaatagaatgtaatgtgaacatttttgaagtgggactgtatggaggagggagaatgtactaaactgaggagggactgcagacaaatttgtcttttagtatttttgttggaagtaggttcattttcattctttccttctttacttcttctttcttttctttctttggacagagtcttgctctgttgcccaggctggagtacagtggcacaatcttggctcactgcaacctctgctttctaggttcaagcaattctcctgcctcagccctccgagtagctgggattacaggtgtgcaccaccacgcccggctaatttttttttttaatttttagtagaggtggggttttaccatgttggccaggcttgtctggaactcctgacctcaaatgatccacccaccttggcctcccagagtgctgggattacaggtgtgagccactgcacccagcctcattttcaataataattctttttttttttttttggagacagagtcttactgtgtcgcccaggctggagtggcgtgatctccactcactgcaacctccgcctcccaggttcaggcaattctcctgtctcagcctagtgagtagctggaatgacaggtgcgcaccatcacacccggctaatttttgtatttttagtagagatggagtttcagtatgttggccaggctggtcttgaactcctgaattcctgacctcaggtgatcctcccacctcagcctcccaaagttctgggattacagttgtgcgccactgcgcccagccaattttcaataaaaattctggcaaatctctctatgccatgtaggtgtcatgatttttattttttatttaatttaaattttttttacatctcaaggacaaaatacgatttcaaaaatcttacccacatctatttaaaatataggtacaatttgcgtttgaattctgagattaaatctgttgaatatggaagccaaacagatacattagaaattcttctaggcaaactaagctatggtagtctacataaattggtgttcttctgtgatggaggagtgttaaaaatttagtataacataccaatatatttttcctgtatagatacttgatttgatattagtcacagccattaatatgaaatgccatccatttctttgtgattaaattgatgtgtctataaagaacaaaaccagctctgttgtatgaaaacctagaattcttatgtgtttactgtttacttatttttttctctttgctagaagaaaatactaagtcaaagattcctattatagttccttctctttcctgctatgttagattcaaatagctttttgttttagatttgctcacttgcctttaaaaaactgaaggataaaatgaggtggacagagaattttagaactggaagagaccctaaatatcattaagtctctcatgaaccctcccgtcctacccatctcctattttaaacatgtgaaaacagaggcccaaggaagatgggtgacttgacttgcctaaaaatatgagggaatttctctccaatagcttttatattctccatgaagtaggtcgtcagcaaagagtggcataggtagaaaaataggtctgttacagatttgaggagacaaaaaagacacttagagtgtgggaaggcaaactttccaggagacatagtagccctgctaggcagtattggatatcctttgatgtttatagttgtgaatttaaagtgaaaccagctagctttgttagctggttttccccctttcctctataataagctgctctggtacaggcacgtaaaagtggaatggaattgttcagctagagttgagattttaccaggtaacagagggagagaagagtaaggggtttgagagtttgaaagagactggttattgttgcatctaaagagaacagtgtaaagatgaaagtaacggatggtgaaaaatgatgagagcatttttgattggattggagaacacagtaagtaaggtgagggaatgttgaatttggagatagtataatgaactagaggggcaggagatacattttaaagactggaaatttggggctgggtgcagtggttcacacctgtaatctcagcactttgggaagccgaggtgggtggatcacttgaggtcaggagttcgagaccagcctggccaacatagtgaaactccatctctagtaaaaatacaaaaattagccaggcatggtggcgtgtgcctgtaatcccagctactcgagaggctgaggcatgagaatcacttgaacccggaagacggagattgtagtgagcagagattgcgccactacactctagccttggcaacagtgagattccatctcaaaaaataaaaataaaataaaaaaataaagactgaaaatttgatttttgagatttttggttaagaatttggagatgacgcagttattgatgatgacaaggtcctgcgtggatcatggaagttggtatttggaggtgaagaagttaaggagctaagaagccagagtgttaggtgggtaatccacgtagactttgaagtcactgagagtgatggtgggggtaagagtggagaagagtgctagaggcaatagagggtacacagttgggtatcatgtcagaagatcttgggtgtttaagaaaggaggagaaatggtttggaagtgataattggatgcaaggagcatatcttttgcctccctctacaccaggcttgtccagtcttttggcttccttgggcctcgttggcaaattttatgtcttgggccacacataaaatacactaacactaacaatagctgatgagcttgaaaaaaaattgcaggaaaaaaaaatctcctaatgttttaagaaagtttacgaatttgtgttgggctgcattcaaagccatcctgggccatgcagccctggggacaaatttgctctagacccttcagtatcctattcctatctcctggcctaaagtacataggatgtgagaggaaaaaaagacccccccattgagaaagcggcacagaaagtggtgtcatctgatttcaactaagataaatcggtgaagatgacatttattgaagagtttgaagttacaggggagttcgttgattaatttattgtacattcatctattgtattttagtacagtagtactaaagtaatacactgttcggttttgtgagttacataaatttccatactattatggcattttaaacactgtgtgtttcagaaaaactctaaacccttgtttttcctctgctcttgcaccaccacaacaatcgttaacatagtaaaagacatctgtgtctcatcttgggaaatttaccaattaaatgaattaaaaaacagacacctgtgaccaaagacgtggggctttttccccacacaccaatagtggatgctagttgggtgtcctccaattcatttcccacactgtctatccagaaataccatcagatcccacaggttgagggctcaggccccaagaccaccccctccttccccccagtcccaagtcctagcctctggaacttctgattggcttcaagttgggtttcccactaccccctctttggagtcgattaatttgctggagcacctcacagaactcagggaaacacttgcttatatttactggtttactataaagcatattacaagggatgcagaagaagagatgcacagagtgagatataggggcaggggcgcggagcttccatgccttctctgggtgtaccaacctcgaggaacctccacgtgttcagctatatggaagctgtctgaaccctgtcctcttggctttttatggaggcctcattgcataggtatgattgacaaccatgtagaaatgtgtttggacaaaaagtgcgtgatctaagcccagcaaggcctgtctgttctgactcttcttggcctctctgtgtagcatttcttctttgatatggggacaggaccctctctggaatgagggtttttgacccaaaaccagattagagtcatgccttgggtaggtaaaaggaggacaggagaaggctagagagagagattctgttcctgaggcctgaagtgcctcaacattattaaaaaaaaagaggactataataagcattatagtagtgaagagccaggaactggctgggcgtggtggctcacgcctgtaatcccagcacttggggatcgcttgagctcaggagtttgagaccagcctgggcaacatggagaggccctgcctctacaaaaaataaaaaaattagttgggcatggtggtgcagccttgtggtgccagctactcagaaagctgagatgggagaattgcttgagcctgtgaggcggaggttgcagtgagccaagattatgccactgcactccagcctggggtgacagagtcagaccccatctcaaaaaaaaaagaaaaagatccaggagctgtggatgaaaacatatatatatgtatttcacactgtgctaaacctgttgtggtattcaggttttcttttgtgggaggggaaaacatgaagagaatagtagttcaaaaatttaaacatctgtcatggtcccataggaataatgtgttgaccggaatgatgatgtcccagccctgcccacaaaaaaccatttaatttatatgctgtattaactgccattactaccatgtgtaacattgaataatgctatttctagaggaaaatgaattcaaagtttgaaattgggatgtcaggaacatttcatctccttttattgctctagtataagagttttcttccttaccttaccattactgcccccactgctactctttgccaagcaattaaagtggaaattccctgcttctaaactactgggagggctctaattttgggggggtccagggtttaatgattagaaatgagaacaaaattcagatgaaaaaaagagcagagtttcaggaagtcagaggatgaggagctatctggggaatagtctgatcttttaacggctccctttccctaatcctaaagcaagcacaaaatatttttagagctttatgatctcttattgttagtaaagatgaaaaaataaatcagaagtgagcaggctatcctatgcttgttattttttcacatgtatttttaacagtatacatactcttcatccactcaacaaataattaattgctactagatacctgggacagtgcttgtatagttatgaagaagaaaaagcttgttgttcagaagctcatagtctaatggagagaaatagatattagttgagttggtactttgggagcatggagaaaaaagcacctggctgcttaggataggtatagacagcttcacagaattgggccttgaagtatgagaggtagttcattcatattctgcagctatttgggtacctactttggaccaggcgcaatactagaatacatttgagaatacaattatgacatacaagagtcttgtcctcaaacagcttttagtgagaaagagcaatatatacgtaatcccaagtgtgtggtaaatgagatagttggtaagcacagggatctatggaagcattggggtgggggtgggggcagatcttactctggaaggaggacttagggaaggcttttgggagaggtcatctaaattgggtcctgtaaaatgggtccacattatctaggtgaaaaagcagatgtaagaaccttccagtaaatgaaatggtatagtgatttggtggtgagtgcacagaattccaaatggttggagtgtagctagagtaggtgagtggcggtgggtaaggatggaggagtgtgaagagccaaggccataaaggaccttacatatagtgctaatgagcttagacttttactttgtcactgtttgggtgctttgaaaggtagaaaatactaatcttgaagggtctttctaacagctggcaattaacagatttttattttatttttttttattttgagacagagcttgctctgtcaccccaggctgaagtgcagtggcacagtcttggctcaccgcaacctctgcctcctggattcaagccattctcgtggcctagcctccccagttacagacacgtgccaccacacccagctaatttgtatttttagtagagacagagtttcactatgttggccaggctgttctcaaactactgacctcaggtggtccacctgccttggtccccaaaagtgctaggattacaggcgtgagccactgcacccaaccagattatttcctgtaagtataacttacagcaatttttttaaaggtattccaggcagttgttaaagatttaaacagtaagagagtgccactcggttctgttccccagaggaagtcactgttgtttcttgagtgttcaagcagcatattcttaatatcagaatagtgttagaaacaaaacagtttcaaaaggagaaggaggggccgggcacagtggctcacgcctgtaatcccagcactttgggaggctgaggtggatggatcccttgagtccaggagtttgagaccagccggggcaacatggtgaaaccccatctctacaaaaacatacaaaaaaaaaaaatagctgggctcagtagtgcaggcctgtagtcccaggtacttgggaggctgagttgggaggatcacctgagcccaggaggttgagtctgcagcaaggtgtgatcatgccactgcattccagcctgggcaacagtgagaccctatctcaaaaaaacccaaagcaccacatatcaaaaaaattcctttactatggaattcccaagtattttgttgagaaaatctaagtatttgaattaaatagcagaccttcttcagaaaaagattaggaaaaagcccttaccgtagtatatgaggtacagactggttcaggatcaagatccttattaatagcctgtgtctatttgaaatgggagagttccctgacccctgttgcaggatgtgcaacaggggagtggctcatctgttcaggccaccgtccatgctcaaaccccttatgggagggggagcacacagacgggcaggtgcagaagccggggcaagtgcccctgggctccggccccctggcagcatccaggggtgggagcctgcagctcctgaagcccaagtgggcatgtgttacagtgagcccctttagccttgcagacgacttaagtgttaaccagctaagtaccctcctggtacccaggtccttgtctggcatccaggaagattcaggttgtacacggacttgaaggatgaatgcatgggttttatcgagttgtggaggtggctctcagtgagatggatggggagctggaagggggatggagtgggaagatgatcttcccctggagtttggctatccagtaggcaatttcctctctgaccatccccagccaaactcctctcggcgttcaaacattccttttcttttctctgctgtgctgttttgctgttcttctgcttctccatttgtctccttgtggagcagggggtttggggtttttaatgggcacaggataaggggacatggcagaccagaaggcatcttttgggtgcaaaaaaaggaatgcctcttcctatttagggctgcaggtttccaggcttggaggtggggcctttgctggagagctaccctcctctacccagtatttccctgtttcctgtccgtatcatgttgagagggtatttgaatgtggaatgaaatttattccaattcttaaacctttctgcttgtataaaaggtgtatgacacttaagataattcacctgaccttggagtacttgggagggaaagtttaaaaagacttataaagtaaatatgaagtttcagttttaaaacattgatctattttgaaaaagggaattacatttattagattgtcctgattttcttttctctcttctctctgagaacataatattaaataggcattatgaacgcctatattaggtgactcattctcctaatgcttaaaatgagtctataatatatattagatactattaggttggtgcaaaaataattgcggtttttgccattgaaagtaatggtaaaaacgcaattacttttgcaccaacctactcttaggggtagtcaggtgatcaagaggtttccaatttgattgacatagtccagtaatgctagatagattttttttttttcattttacttaatagtaagttgggacccttgcaaacacttatcttcggacattcagagtgaaataattttatagtctatacttttaaaaaattcagcatgtagcaagaccaaggaaagactttcaaaaaggaagaaaatggtatagcattaggcaatgccatctgcagttattaaatatgatattttaaaagcttatattttctctttcaaggtaagaatttggtaatattggtataagaacaaaagtcttttgacccaaggctttggtttcaagttctaaatgccattactatgccctatatttattctttcataaacacccaattttgtttttaacatcagtattgagatttttcttatcaattatgatatattttcagggctgatttgtgtgttataaactgatttatcaggtaatctgggcattttaggacatcttaaatattaaataaatgatcattttgatcttgttttcttgggaaaaagactttaaaaaaatcatcctatgtgctactctttcttgaatccacatgcataagcatttggtgctgttttggtaaccttcagtcactaagcttctcagtggtaaaatgatatctttatgaatacagtttgtattgtaaaattgtacttttgggggcggtcttatagctgttttaggttttaagtagaggtcaaagtattaaaaaaaattgaagaagacatacttaaatatacaggcaagcataaaaccttgttttaaacatttaacttaaaaaaaaaaatcagaattttatccctccataggaaaggatagtttaaaatgagcatgtccaacccacagctttgaatgcggcccaacacaaattcataaactgtcttaaaacattatgagatttttttgcaattttttttttttaagctcatcagctgtcgatagtgttactgtgttttttgttgttgttgttttgagacagagtctctctctgttgctcaggctggagtgcagtgttgtgatctcagctcactgcagcctccacctcctgggttcaagcgattcccctgcctcaacctcctgagtagctgggattacaggcgcccaccaccatgcctgcctattgtttttttgtatttttagtagagacggggtttcaccatgttggccaggctgctcttgaactcctgacctcaaatgatccgcccacctcagcctcccaaagtgctgggaatacaggcgtgagccaccgtgcccgaccagtgtattttatatgtggctcaagacaattcttccagtgttgctcagggaagccaaaatattggacatccctggaaaacactgcataccttgaaattgaagttttaaccgattaggacatgttaagaatttagaaaaataaagttcttacgcacagttttttctaaatcttttgttaattgggtaaaatggttgccagaggtgattgtgttttttttttgttttgtcaacatcatagaatttataaacttttttataaagagtatgacttagttttttttttcctgcaatcatattttccagttgaaaaagcttttggccattacattcagctataaattagtaacagtgtgcatatgatttctgattatttttcctcttgagccagaactagaaactggtcctgtaatatctgtggatcttgttctaattatatatccctttttatttgaaatacttagtattttcattgcctatatggtgaattctgagttttttaacctaacacacaatattgaaatctctgccctgaaaaattcctaaacatccttgaagtctagttctgttactactttctctctgaaatcttttttgattacctagctggaaacgatctaatctcccattctttaacagtacattcccttgtattaaaacttcttctgtaaatgtcttagtcctcttctagattataaattgtcttactcattattgtatcatctacattcatacattgaacaaaaagcaccaagcactgttatagatgcgagggaaagagcagtgcaggagaatcttggttcttgtcttcatgggatttatattccactttggaaaacaatgatgagagagacagaaaattaaataaatacatagatagagcttttcagatctcaaatgcttagaatgtgaaactccatcatgtggtagaaagtgtgaggatagcaccagtgcgttgataaggtgatcatggaaggtgtgatctttgaaaatttgacatttttgccaaaacctgaatgacatgaaggactagtcatttgaagatttggaagcagaatttttgaggctgaacgaaaggtagttctaaggcataagaaagaggtaggtgaggaaggacaggagaagtgataagaatcagatctagattatgcagagttgtaaaccaaggtaaagaatttaaaatttattctgattacactgggaagccaatgaacagtttgaagtttttaagggctcatgtcattacattgggtctacccaggataatctcatgattttaaggtcagctaactaataaacttaattttatctgccaagttccttttaccatataatgtagtatattcactagagtaacaccagagggcaagtcttcagggcctaaatgctgccacattttgcatgcataagttttatttaatctaatatatatttagtatcttacaagggcagtgaaacagaactaacttagggtagctgagttgttgagtcatcacagtttttctgatttattttgcctttactaatatgcccactccttggcattacctcttatttgctaatgcccatacgataaccccaaactctgtttctctttagttatttaactaaattaacataaagatgtctcctgcatttaaagaaattttgttccagatattttccagagagatctgtattttctcatggataaaaatttatgggtggattcattgtagattctaaaaggacattttcaaatctgtttgagttttcttatttttacctattctgattataataaatccattcattcaataaatatttatcaagtacctactgctgcagagccagctactatatagtaagcatcagaatgataacagttgaacaagtaactttttatgagggatgaggcttgaaaaagtacaagctgctctgaaaggtaccttagtgaaggaaattgctgctgagacatggaggatgaggcaatatagtcagcattggctttgaaggcggactgccatttcactgttgggtgaatttggatactttttaaaatttctttgagcctcaattttccatgcatgtgaatagtgatacctttatctctatagaagttttgttagattgaatatatgaaaatgcctaacgtaatgtttgccactggtttagaagcatatttatcatgaaactgatgaagtttagtgaacctaattgcatggccctttctaaggcccttgcaggagcagccctagcaatcttgaattaatttgtgtttttcttaaggaccctcccacccagctgcccctttattataggctgctggtcaccacaaaatctgaatctgcctttggccacaggttaagtgagaaatgttaatttctctctcctctaatgttgtgacttcagttagtgtcgaacctagaagtacttaacttaaaaaaaatggaaagaaattatatatattaggttgtaggaattttataaaattcagaaaaaccgaaattcttgtaattcctagggaggaaacatgatgttttatctctctctgcttttctctgtgtacatacgcaatttattttttaaaagctagtttatatcatattaaacagacaatattctgcattttcacataatatatggattatataattatatatcatataattatattttacaacgtaattttaatcatcttataaatgtgccaaaagtataattaaccaagctgttgttagtaattgttgaggttttttctaacatttcagtagtacaagtaatgccaaattacaaatctttgtaggggtatctgtacataggataatttcttttaattgggcttgcttgagtataagaattgcctttgtccattttctgctactataacaaaatacctgagactgggtaatttataatgaacagaaatttattggttcatagttataggagctgagacgtccaagagcatggcaccagcatctggtgagggccttcttattgtgtcatcccaaggtggaaggaggaaggacaggagacggccagagcaagcaagggatcaaatttgtagcctcaggctttttaataaaacacattaatccattactgagggtggaacgtgaatacctcccattaggctgcagctcccaacactgttgcattggggattaaatttccgacacaggcttttgggggacatactcaaatcgtggtaaacattttaaagacttatatgtcctcactgaccctacaatattattttaaaatatcattgcctatttttatagtactcttgtgtttatttctatttctttgatcatttgatatactaaaacattcttctgggtttttttggttttgttttgttttgttttagacagagtcttgctctgttgcccaggctgcagtgcagtggcgtgatctctgttcactgcagcctctgcctcccgggctcaagtgattcttgtgcctcagcatcccgagtatctgggactacaggcatgtgccacctcgcctggctaagttttgtatttttagtagagacagggtttcgccatgttggccaggctggtctcaaactcctggcctcaagtgatctgcccaccttggcctcccaaagtgctggggttacaggcatgagccattgcacatgaccagaacatttttctatgtatttattagtccttcatattttttctcatgttaattgccagtacttatgcaagataccgggaaagctttttgacaggaagaagtaagtttctttctcctgtaagcaagtcctgaggctgtataacactccaaattaaaaggctatttcaaaatggtttccctactgtagtgcagtgggaacttcgagagcagaatctaaaggagtgcttggtgtttctcatccctggcagcacataccaaagcttgggcactacccacagattctttcttggtgttttaaaagctcctcggagtactaaagggattctgcagtgtaacaactaagctcagaaacttagtcccgtggctgcatcacaacatttgtttttccatatacaggggccagagttttaacttagaatattccgtttcctcagtagaaggttatattttacaataatattatttaacaattgctctactattattccgtgagggcatcttaattgaatgccctttgcgggttaatttaaaatcactttttaaaataatgtttaatgaacacctatgtagaaaacattgtgatatacaccatgagatatgagacaaaatcaggtgagggctcttcccttgggattttaatagtcaggaatgggataagaggtgtatacacacaggtacaaaatgtgtttgtgccataaaagatgtaggaacaatgaagggaaaaggagatgaattgattctaggtgggttgctggattacttcatgggaatttatgtttaagccaaaccatgatttgggccagtagagcaattaatcatcctttactttaaaaaattgtttcagtttataaagcttgttcataatacataatgatccttattacagctctgcaagataagtcagttattcccattttatagatgaaggagtagtcaagccttagaaaagttaaatgacttttccagcgttatcaagctacaaagtgaaagattcagaacttgaacctaagtcttcaatctccatatgctggagccttctaaagtatctcagtagagtagcgaagagctatatgagtaagaaactataagttttagaaagggctgatagttaattttattattaggatggaagttctgaaatagttggagataaagctatagtatggtcagcagaataatggctccctacaaatgtctgcttcctagtccccagaatctatgaatatgttaggttatgtgacaaaagggaattaaaatggctaatgaggtaactttaaaataggaagatcatcctggattattgacgtgggccaaatgtaagggtctttaaagaggttacttaagagtggaagagggaggcagaaaaatgagagtcagagaaggagatttgagaaggggcaaggtcagtcctgcagaatgagaaagactcagtccaccattgcttgctctgaagatggaagtgaagtgctatgaaccataaaatacagtggatctgtagaagccagaaaggataaggaaacagattcccccttagagcctctagaaagaagtgcagccctgcagacaccttggttttagcctagtgagacccattttagacttctgacctacaaaactgtaagttatcaaatgtgtgttttaagacactaaatttgtggtaatttgttttggcagccataggacatttaatacgcctaggaactattttattgtaggaagactaattaacatgacctcagggcactccatgactaaactccaaactgtctctgttccactgtcagcagtagaaagacatggaatgttcttgagcaaaagtgtgaagaactattttggtgtttgctgattagagaggatattggtgagaggaaaattaattaagattctattagatgctaggaacacttcttttgagactcactccttgaggtaacatagaacatactggtaagtcttgcccgtagaagactatgaatatatctcccagtcctgtgtggctgctcacgtctgtaatcacagcaccttgcgaggccaaggcaggaggatcacctgaggttaggagttcgaggttacagggagctgtgcttatgccactgcactccagcctgggtgacagagcaagacctcgtccctgaaaaaatgggagatggttaggtggatggatagacagacagacatatagataaagatagacacgtgggtcaagatctcccacttagtttatacatcactgaaaatctcattgccattgtaacatttcacctcgttctcgtatcccatgaaaaatacagaaccagttaggcacacatctaacttatctcttcttaggcttttccatcgtaccataactaactataagatccgaacactgaaaggtttctaaatctgagctttatttgatgccttagtacctgtagaagttaaatttatactagtaactgttttttcaatgcataattattattttgaaagaaaaaaaaagcttgttgatatctgtaggcataactctattctatgtctaaggtcttcggtaaagagagacgattaagtttatcagtaaagcaccagagtcaattaaggcgactgaaaggagcactaattttaattcattttacactagttaatattgtcaatattcttcttgtcagttttttaaaccaaaagtcttaaattaggccaaaagtgcctaggtaaaaatggaatggaaagggttttcttgtgtgtgtgtgtgtgtttttttttttttttgagatagagtcttgctttgtcactgaggctggagtacagtggtgtgatctcggctcactgcagcccccacctcccaggtccaagagattctcatgcctcagcctcccaagtagctggggaatgtaatatttaagacattaagaatcctattaatcctatttagtcatttttttttgtagctgcagaaggttcagaagggttttttaagttgaattatatgttcatatttacaacatttacatatgaaaccatttactaaaagcaatgaagctggttataacaaacactgatactgaaaataagagatatgtttgtcagtgcggtctttaaacagtgttacacaatttatttctgtttcattttgatcagaaaaaatatatatatcttttgagacatggtctctgttgcacaggctggagtacaatggcgagatctcggctcactgcaacctctgcctcctgggttcaagtgatcctcccacctcagcctctagagtagctaggaccacaggcgcgtgtcaccacagctggctaatttttttgtattcttggtagaaatgaggtttcgccatgttgcccatgctggtctccaactcctgagctcaagtgaactggccacctcggcctcccaaattcctgggattataggcatgagccactgcaccctgcccagaaaatatttttaatgcatacatatatatatatatatatgtatatgtagtgtaaataacatcttcaatcaaatagagatggcaggagctttattctgagctatgtgcaaacttgataagacaaggtaatgcttcagtaattttccatgctgaaatttggcccagtatactttgattatatatctatatttaattatagttttaaaatagctaagcagttttaaaaattcaaattaaacttttgtggaatctctaaaaataagaaaaatattactgagtaattggcaacataaaatacaaaatgtttaacttggctttcttttagatttgaagcatagtgactaatgaacatataatggtcgtagctttctttacaactatgtcatttaagtcactgatgaatatctatgatacatgcagtaaaaatttagacaaacattttggctacaaactggtttactaaataatagcttgtatcatagtctgagtcaagagtaataggcttacaattgtgtcttagggtactaagaagttcttttgaggaccttttaaaaggtattctttgttttgaaagactgttttccttctggaagttctaggccttatgagaaattacctattctgaatttgtcacaaaaaatgacttgtaaataagtcctgtgcagtgaatcatgtgctttcagtaagaggattttgaaagccttttgtaaaatgaagtcattctcaaaagagagttatttagaatataatcaaattgatttacatgcttttatttatttcaaatatgaagggaaattgtttctaaatatatttaaacttttaatagaacagtagtatgccatcagtgtggaaataactcacttgttaaataaatatttggggtgtatttgctgtatatcaggcattgtaacacagggactaatgaaagagaaaaaaaacaaagcacgaaaggacagcagaaatagctccataatctcactttccaggaataacctctatggacattttgttgtgtgtctattgcttttctaatatatacattttttaatcaaatggaattgcctcaaatatgctatttaatagcttgcttcttttcatactatttgaaaattaagaaacgattataatatgcttcatttaaaaactttaagtttaggccgggcacagtggctcacgcatgtaatcccagtacttggagggaccgaggtgggcggatcacaaggtcaggagattgagaccatcctggccagcatggtgaaaccccgtctctactaaaaatacaaaacttagctgggcatgatggcacgtgcctgtagtcccagctacttgggaggctgaggcaggagaatcgcttgaacccgggaggtggaggttgcagtgagcggagattgcaccactgcactcgcctggtgacagagcaagactctatctcaaaaaacaaacaaagaaaacttgaagtatagtatccttttaaattttaaatagataatagaaactggtttccccccatttaaaccagaatttaagtttaactttatatattcttgacagtttggattttgtccttcaacctcataaaattgggaatttaagcatcacctggttcgatttaaatgcaatgtagaatttgcattaaaatactacattaaagcctcagatttgtagtagctaacagcacttctatgtatgtgtcagggactgctctaaatacttcatatatattaactcctctattctgtacttctgttcccgttttatacagcaggaaattgaaacactgagaggttaagtaactaaagttacagagctagagtgacaggagtaaagcttcaactcaggcaacccagacttccagagttctgatctccactactaagctgctagcatagcttttctggtaactatttttaattcaaatataattcgagtgatctatctaacaagtcatcactctgacaactcagtgacttgtaatgtaaaattattcattgtaattcatttaatattattgtttctctgtgctgcaaaaatcatagcaatcgagatgtaatttattactctccctcccacctccggcatcttgtgctaatccttctgccctgcggacctcccccgactctttactatgcgtgtcaactgccatcaacttccttgcttgctggggactggggccgcgagggcatacccccgaggggtacggggctagggctaggcaggctgtgcggttgggcggggccctgtgccccactgcggagtgcgggtcgggaagcggagagagaagcagctgtgtaatccgctggatgcggaccagggcgctccccattcccgtcgggagcccgccgattggctgggtgtgggcgcacgtgaccgacatgtggctgtattggtgcagcccgccagggtgtcactggagacagaatggaggtgctgccggactcggaaatggggtaggtgctggagccaccatggccaggcttgctgcggggggaggggggaaggtggttttccctcgcactgtcttaaaccgatggcctttccttggcacagggtccactgcagcatgccaaacgaggaggcaggggcgtcgtccccccgccccccactgcagcactggagatggatttcctgtacttcggatccagggtttttgacagaagaggaagaagggggaggggtagaagtgttaaggggagtctgctgagaaaagctgtttttgaagccagaaggggtttttgtttttataatgccatttgacagagtggaataacagtatctaaggaaacgggtagaggacaacaaagaatggagcatattcatggcgaggagcaaaagctctaccccattgaaaggcttcttttcctccctggcgacaaggacacatgcattggtggccaaaagagagaggagacaaaaccgctgcagatggctgatgtgaatctagtggaaagagctactggggatgagagaaagaggaggaggcaggtactgcagagcgtgagtggtggtgttggttggtgaaatactggtcaccagtagtgtgcctgcttttgtaaaacatctaagtaaactccctgtgaacagggtggcaaacagataccagtgtctttgttagttacaaaatgcagtggtagtggctttttgcggacgactgcagcagtgctttttctccctctgttaggccgaaaagacaactgcagaggaataagaaaccttgcagcaaatgctggggtagaagcccatttacaagaagccatagtttataaatgcagcctgaacagcagaaaaaaaattactgttttttaaagtaggaataatgtcaggctatgaatgttttgtcattggaatgtattggacactttgattctacatcacgaaagtgatgctcaaattctttgatttaacataaatcctatacgaaatcttaataaattatgtatgaaacagtggatcttttcttttgttagtgaagcttttatgccattaattaggtcattcaagagcaaaccactttacaacgtaaattactttgtcaaaaattatggtgaacaaatttttgtaggcctaatatttaagacctatagttaagtaattttatatttctctttggttgcttttagataacactgaataaatatttaagatattaattcagtgtgcaaatattttaaattaaagcaacatggcttttcttctagatgtatttctgtttagtgagtactcatgagatatactcttgatataaagtgtttttcattgagcttttttttcctttacctaaatgtaaaagcctatctttatgcatacttatagtagccagcctgccacacctccccactccctgaacaaggatggcagtggctttgtaaagccctccagggtcagtgacagtgtctcttaaataatgtttatgtaatagaaagtcttaagatgacctattatattgtttcagtaatattttcaagataatgcggaattgggctggcttagataaataagactacataagtttttcactgataaatttaaatagttctttaaaaaattatttctgctttaagaattacttgatcatggatatcagggttaatagtacttaggagccgggcgtggtggcccatgcctgtaatacaagctaaacaggaggctgagggaagctgaggcaggaggatcacttgagccttggcgttcaagaccagcctgggcaaccaagcaagaccctatctcaaaaaaaagtacttagagtctcttttttaaaatctgatggaaactatggctagaactaaagatgtcacattaaaattccaaatgacatttaacagctaatattactcagttctttgaattccattagcatagtgtttgagagtctataaaactattatttttacataaattaccttttaccattttaacagctcattgtagcattatttttattttaaatgttagagactcctattcaagtatgttgtgactttatccaaggtcaaatattgtataacaatgtaaagaacttaagtcttctattttattctaattctataaaactataatgccttttattacatacatacaaaataatatataacagaggtaatttgaaaaacagtgtaagtcactgacaaattattcaaaaaatgaaaaggcaatcctacttggttgtggatttttatctacaatataagaatgctttaaaaaatacctggtgactaagcaaatggagaagcagcagttttcataatgacattcataaacgactttttaaagatcgtcttattaatcatatgaacacatttaagtagaacagtgttagattgagatgtttttctgaattaaataagaaataaagaactaaagtttatttcattcctcttgtagtatatctaatctatgactgacctattggctttagtggtctttgaaattattcactgctctgatatggcctgaattgtgctgtttaaggaatttaaaattaaatattcataaatgttttatgaactgaatttaagctattgaagtttttgttttttgtgtttttttttctttttttttttttttttttgagacagggtctcactttgtcaacccaggctggcgtgcagtagcaaacatggctcacttgcagcttcaacctcgcaggctcaagtgatgctcccacttcagccctccaggtagcagggactacaggcacataccaccgtgcacagctaatttttatattttttgtagagatggggtttcaccatgttgcccagggtggtctcgaactcgtgagctcaaatgatcctcccacctcagcctcccaaagtgctgggatttacaggtgtgagccaccatgaagtttttccatttgcattaattgctctgtagattttaccatttttgtctgttttataaactgttactcattttatgaaatttaaccaatcttttatacttgtatatgtttaaatgatcttttatacttgtatatgtttaaatgttctcttcaattttgatctcccttctcccccttttcttgtattagaatctgaaacctacctatgcagcacataaaatgggatagagtattatggttcagaaaagatgggtaatagtttaggaaatatattcactacatatttattaggataccttctaaatatcatctttgaaaaatgctggagtcaaataagacacgtaaactaatctctaagaaaactcatggtagaattatgtgaaatttcattacaagttaaacactgctttggctactcctaggatatttaaagatttatataatctaagatatcctctaatttagaagaatatggtggattgctgtttgaaacactgctttttcataaaatctgcttagagtcacagagaatttttgaaaactaaattacttttgaagtactaagtatcttgaatgtacaatgagaacattaggtgaataggtatgttctcaaaagttgactttgtaaatcaaatcatacatcatcagttgatacaaggtaagccttctcccctttattctcacaccctgcacccactcttcttgtgtgtttaatatgcataaattcttgagaaatagcatcattttgtgagtctgttttttacagttaatgagatttttaaaaaaattttattgtgataaatatacataaaatttaccatcttaagcacttttaattgtacagttctgtggcattaagttcattcacattgttgtgcaaccatcaccaccacccatctctagaaatttttaatcttccctaattaaaactctgtgcacattaaacactaacatgccattttcccctccccccaacccttggcaaccaccactccactttttgtctcaaagaatttgactattctgggaacctctaataagaaaaaccatttaatatttattcttttgcacctggcttatttcacttagcataatgtctcgaaggttcatccatactgtagccatgtgtcagaatttctttcctttttaggtctaaatgatgttccattgcatgtatatgccacattttgttcattcatctgtcagtggacacttcaggttgtttccaccttttgtctatcatgaataatgctactatgaacgtgggtgtgcaagtgtctgcttgggttttactttttttgtgtgtactcaaacctgtgtttttaatttacataatttttgaacattattaactcaatactgtttttaagatctatccattttactttatgtccatctagtttgtgatgctaactctgctctatagtattctatagtacctatcactgttcctccagtgaaggccgtaagttttctccaaatcccgttaaccacaaacacctttatgatatacattcttatacatatctccttggactatgttatttatgtatttctgtataacaaattgtaccaaaacttagtggcttaaacagtttctgtggggcaagaattcaggaatgtcttagttggatggtctgactgaggcaggatctcttatgaagtagcagtcacgatgtcagtcacagatacagtcatctgaagggcttgactagactgacggatcttcttccaagatggctaactcacatagtctcagtttttcattggctattggcaagagacctcagttccttgtcacgtgggcctctccatggggctgcttgaatgtcttcatgacatagcagctggcttccctcaatgattctaacagaaaggccatttatgacctagactcagaagccacacaccattgcttctgctgtattctctttattagatatgagtcactaagtccagcccaccaaagagaggaattaggatccacctcttaaaggagtagggtcaaagaatttatgatatattttaagatcattacatcgaccagtgaaacagtttcactggatttatccctaggagagggatcactggataataagggcattgtttcctattgctgttgtaacaaattaacacaaacttagtggtttaagagaacacaaatgtattatcttgcagtcctggagatcagacacggttttcactggaccaaaatcaagatatcagtggctctgcgtctcctctagagattctattgaagaatccattttcttgcttttcttcagcttcttgcattccttgtctcatggcctctttctccatcttcagtgccagcagcattctaaatctctctctgaatctgaccctctgctgctcttgtcacatattcttctctgacccttctgcctccttcttaaaagaacctttgtgattacattgggtccacccagataatccaggaaaatcagcttcaagatctttaacttaatcacatctgcaaagttcctttagccacataaggtaacacattcataagttttggggactaggatttggccatctttgtggggccatacacaggcatactcatctggttctccattttttttaagctgaaggatttttttagttatttttacttttgcgaatgtgtgttactttcttttggtaatttcagattttcatttaccaagtttatttaaagcatagtataatatataatgatcaccaagatggtaagcagatattcattgttcaattagattcttgattttatcatcacttaatttatatcagtgtatcagctacttctgacatagtctgtaatagaaactgagaaacgttaaagcaacacagccttattaaatttctctttgtatcttttagactcgttataacaccagttctgtgggcgctttgttgaaacttgatctgtcattgtcttaccagtcattgaacttagggccactctaatccagtatgacctcatctcaaacttgatccatttatgaagactctgtcctcaaataaggtcacatttgacatgacattttttggtgtttttttgtttgttggtttttttccctctgttgcgcaggctagagtagcttctgggctcaagcagtcctcccaactgagcctcccaagtagctaggattacaaacatgtgccaccacagctgactaatttttaatttttttttcataaggagagagtctcactatattgcacaggctggtctcgaactcctgtctacaagtgatcctcccacctcagcctcccagagtgctgggattacaggtgtgagccactgtgctcacacctgtaacatatctttttatgaaacacagttcaacccataacactcccttaatacttggtaccttgtgaataataagatacctaaatatggtaccttgtggataacaaggcatattgtcttactttttttatggaaaagtcatcttggacattctctgaacttgtgccctctctttctgttgtctgccctctgtggctgataatgcaccctttctgttcattcttacgtgtatatttgtcttttatatggctgtcgctgagtaaagcattttgggaattacaaaagctaagtattagatatagaccttgtcttcaagatatttatgctccagctgggaagacaaaacaccccaaggtaaaatggaataatttgagaagttaggccaaattgtatagtatttactgttcagccagcaggaagattcattattggctagagacatcaggaaggttttgtgtaagaaactgagctgggccttaaaggatgaggatatattataacagcagaggaaaaaaggatgtggtattcagaaaggggaggaggtataaacaaaaatataaaggtaagaaatagtttgtagaggaaagtgaggagagacttacttgaggaaggttatcttggaacttaataggaaataagttttgaaggtagactattatcagatataatagattgtgaacaccagacagaagttatacagtctttgagagcatgagcattaaaaacaagtacagatttgaattctggcataggctcttgatatgtgttcttagggaagttatctactgttttggagttccatttttcttaactcaaaaatgagtaacacctacctcataggtggttgtgaggattaaatgagttaatatatagaaagcatttacattacgtgagatattgtaagtactaaatagatatcaggctttctgaatttcacatatcaaatacataaaaaataagggcatatataggatttaaataatatgctggtcagttatagaactttatatacttttccttttaaaacatttttagtaaaatttttatgaaaattagtcaaggcaaacctttaaaaattttcagatggtaacaattttataagcaatagtcttccattaatctaataagcaatgtatcaatgacaataaaaagatgactcaaaaagccttatatacctaacaattgagacagatctttgaagtatcccctagatcaaagaggaaatcaagatggaagtcatgagttatctggaaataaagaggggaacacttcatactaaaacttgtggaatgtagataaggctgtactaagagaaaaattgatgtccttaaaatttatattattaaggatgaaacgaataagtgaatgtttaagtaaagtaaggaaataaatgaattaatattcactttattattattattattattattattattttttgagacggagtctcactctgtcgccgaggctggagtgcagtgttgcaatctcggctcacagcaacctccacctcaagcgattctcctgtcttagcgacccccccaccccacaccatagctgggactacaggcgggtgccaccacgcccagctaatttttgtattgttagtagagacaggatttcaccatgttggccaggctggtctcaaactcctgaccttgacctgcctcgcaaagtatggggattacacgcgtgagccaccacgccagcctttcactttaaataactattaaaaataacaaagtaaaccaaaggaaaataagaggatataattagtaaagataaagaaattgataaaatagaaaataaagtagtggaaagtatgtgttgatgtttttgtttgttttggtaaacaccaataaaataaatgaaaccctaaaaagtttaaaggaataaaaggcaaacagaacatcagtgagaaaagataccttcagataaagaatttttaaatgacagaatatatacaactctgacaatacatttgaaaaactagaggaaagaaatagtttactagtgaactattaatgaataaaattaatacaagatggagaaagcattaaaagagtaaatcacagaagaaactttaaaatactttaaaaaaatcttagctctaaaatggcacctcttttgagtatccgtcactttgataagaaaaaagaaaaaaggcaccttctgatttgaattctagctgactttcaaagaatagacactattcaaactattccagaccatataaaaagatgagatagcataagcttaattgaaaaccttatttcaaaatactataaaaatttaaaactatacattttctctttaaaaattctaagtgaaatatggaaaaatcaacaggctcgtaaaagcataaaacatgaacaactggggtttatttcaggaatggaggataggtcaacattcaaaaatcttataactgactgcatcaagaaattaaaagagaaacgatatgattatacaaaaaagtgctatttacgttcagcaaccactactaacaaaaactttaaactcaaaggaaaatgcctaaacatgtttaaaaaatttactgaaatctgagtaagaatattaaatagtgaaataatatgccattcttattaaaatcgagaataagatagtttattcgacattttaaagtttcaagctaacaataaaacgtgaaaaagaagtgaggtacaaatgcaggaaagaagagtcacaagtatcatcacttacagattatatgattgcatacccagaaaatccactggaaaccctattggaattcatagaatcatttgataaggtggccacacaagggttatgagttaaatagaattagtagcttttatatatactagcaatatttgtttttctttctttcttttattaagagaaggggtcacactgcattacccaagctggtctcactcaagtgatcctccagccccagccttccaaagtgcttggattacaggcatgagccaccacacctggccattagcagtattcgatgtggggtggtggtggtcattcacagcaactcaaatagccaaaagcctagggataaatttgatgtgaaagatacagaggcataggacctttttcttgaggggggaaaaccctggaaaatttgattgcagaggctaaattattcatgagatatagtaagacttagtatggaaatgtgagcctctctcaaattaatataaatatagttacagttctaagtatgagaattgagctataagaaatacgtttccattcagtggaaaagaaatggtttgtttaatagtgctgatgtaattgcactgtttattactactttcagttatccatatgaaacacaataaagttagaccactacactcatgccatacacagcaataaaaatgccttatgaattaaagatctaaatgtaaagtaaaatttcttattcaagctagtgaattaatctcccaaatttatcacctctttcgcctaagaccccattaaagtgatagtaaaaacaaaataaagatgggagcttacaatgccataaagagtaagagacattcaaattgacattgtaacaagtttctggaagatgaagaaatcgtgggaattaaaatggatcactgaaaagaaatcaaggattctaagacttcctagttctctgttctttccaacatggcaggttggaaatttagtatttaaaagtaaaatactaattttagtattaggaatttctcaatggcctttgaaattatttgggttaccttggggtgtttgaaaacccaaattaggaaattatgctttagaccacctgtttttgtaaattaagttttattagagcatgggcatgcccatctatttatgtgtttggggctgcttttgtgctacagctacaaagtcaagtagttgcaacagaaatcatacgacccacaaagccttataatatttattatctggcccttacagaaaatgcttgccaacccccgctcctggtcgttgggatgggcatcttgagacctgcccacacgtggtatgggcttggataggtctagccagtgttatgtagctatttacagaatgtaagcaaaggaaagtgtggggaaagaatatggcaaacagaaaactgaatatcaccacctaatggggccttagtagggaagagaaagagaaatagaaaagggttgttaaagagaaaattaaaatggatgaggtgaattctgcttggaatttaaaactttttggtatattattgattttgtatctggcaagcctaaaatttttatatttctaagatgtttctattttgtttctttccaatgataacactttctcttttttaaattttactgtgtgaattaggacttccaggattatgttgactggaagtgtggatagtagacatcttattcctgattttaaagagaatgtctgtaacatttcactatgaagaatgaagtttatagctgggtgtggagcgcctgtaatcccagcagtttgggaggtggaggcgggcggatcacttgaggtcaggagtttgagaccagcctggccaacaggtaaaaccccatctctgtaatcccagctactcgggaggctgagggatgagaattgcttgaacctgggaggttacagtgagcccagatcatgccactgcactccagcctgggcaacagagcaagactccatctatttaaaaaacaaaaaaaagaatgaggtttacaaaattagctgggcatgttggcttgtgtctgtagtcccagttactctagaggctgaagcaggagggttacttgagacttgagccagggaggtcaaggctgcggtaagcctaggtgacagagtaaaaccctgtctcagaaaaaaagaatgaagtttgctttagctctgacagtttccctcctatttccaggtttttatggaaagttttttctttgtctaagatggtttttctttagtattttaatgtagcgagtgacacatataaatgatcttatattgcactctactcgcattcctggaataaactcagctttgttctgctgtagtttctttactgtatgttattgtattctgcttcctgataatctcgtttagatttttcaaatcaacatttgtaaatattagcttatgattattctttttcacacaatctttgacctgtatgtcatggttagattggcttcatggaatgcattggaaaatatttgctatttttccatccttagaagcatttgtataagattggaatgatttgttccttaaaagtttggtagaaggtgtttgtaaaaccattcagatacggtattttgaaggatttggaggaggaggggaaagatattaatacttactgctccaatttttttttttttttttttttttgatatggagtcttgctctgtcacccaggctggagtgcagtggcatgatcttggcttactgcaacaacctccacctcccgtgttcaagcgattcacctgcctcagcctccggaggcgctgggactacaggcacatgccaccatgcccggctaatttttgtatttttagtagaggcggggtttcaccatgttggccagatggtctcgatctcctgacctcgtgatccacccgccttggcctcccaaagtgctgggattacaggcatgagccaccacgcctggtccaattttttaatagttgtagaactattaaggtttttctgttgcttcttgaatcaattccccctccctagaatctttaatatgtttggaggttgttttctttttcctgtctctaatcatacttagttgtttttttttttttaaatccaacttttggatggttttctttttctctttttttttttgttttttttttttgagatggagtcttgctctgtctccctggctggagtgcagtggcgcgatctcggctcactgcatcctccacctcccaggttcaagctagtctctcacctcagcctcccaagtagctgagattacaggcatatgccaccacgcctggctaatttttgtatttttagtagagatcgggtttcaccatgttggccagactggtcttgaactcctgacctcaagtgatccgcccgcttcagcctcccaaagtgctgggattacaagcatgagccaccgccacctggccaatgctttgcttttcaaactcttcaaagggtatgtaataaaaaggaaggcttaccaccagacaccataccttgattctataagcagtgactgtatttttgtatgttctttaagtgatattttttatccttatgcactcctttatttttactggaagaggagggaccacatgaggcattagtgatgagcattctttttttttttcttggcttttgcctgttttttatgtttgtttgttttgtttttcatcaacctcatttttacatcagcctcattcttcttaataccaatgtagtatttcactgtacagatgtgcattatttattttaacgtagttgtgcttttatagcaaatagaaactttcccatttgtttgaagtaccctaagaatctcctttattactcctagtctagtaacggacatcattactttagagaactctacttggccctctgtgtgtcttacacccattaaacaaattaaaattaaaatgttccataccatcctttgaagagggtgtacaccatttaaatatctttacttaaaaaaataaaagtctgctctcataagcaatgaaatgtttttcaaacatttaaatctctgttcctttttgcaagttatcctagtgtgttgtatgaggaatagatgcagttttttctttttcctcatggctgtcctatttcccagcaccactttaaattccatctttttacaagtattgagatgctactttaatcatatactgaatttatatatatttacttctggattttaaacattgtgttctcgtggttgatctattcatgtactggtattgtagctttttaaaaaacttttaattttaaataactttggacttacagaagagttggaaaaatagtacagagagtttctatataccttttacagattccccagatgattaacatcttatatatctgtactacaattatcaaaacaaaaaaactaatctattggtacaatatagttaactacatttatatggttttaattataaaggctttgtacaatattttaatatgttgttggtttactccctgctcttctttcatattttcaattttttaaatgtctagctgcagaaaataaacaaaagctttatatagtatttttactgggactgtaaaatttataagttagcttagggagaaatggcatttttatgttgctgaatcttggtataccagaataagaaacgtctttccatttgttgaagtctacttttctatctttctcatatatgttttggactctttttgtagtttatgcccagatatttgcattttttattgtaaatgggatcttttctttcatttatcttctgtctggtttctctcccctataaatgaatgatttctgtatattttgtactatactgtattgccaaattatattattataataatatttcatcgatgcttttgtatattccaggtatataattgtgttatctgtgaataatgttccctttctaatttttttctaattttattcattaatttgtgttgactaatattatgactaatagaatggtaccctgactgtaggactatatccagtgtttccacattaagtatgctgttggccttggggttgatagatcatgttaaagaaatgttcttttttattcagtattttcaacaagaatgggtattaaatttgtaaagtgtcttttcctcatctttggcatgaacatatgattttttcccatatctattatgttaaatgatataattaattttctaatagtgactttttcattgtaaattatatttttcatctcttttgggatcagttctgatagattatatcttctagtaaattattttgggttttcaaatttgtttgcatagagttgagcagagtcatcttttatgattcttttgctttcctgccttcttattcatattttcctcatttcatctaaaaatgctggaaaatatatctttgtttttccatgaaaacaaaacaataaaagcagctccattaatgtaaaaaagaagtgatctcaaacttctgaaaataataatcctccacatttaattctgattatcttttgccagcctgaaattttttgcttccttgctttaatttcttacattacttgtaaatttattttctaatgaacatttgaataaaagtctagataatagtccttgtgctttcttctcccctaccccacacttacaaggtgcagcagtgtctttagtggtcatcttaactgcagaaaaacaaattgagaggtttgcatgctctcagtaaagtgaaagattgggaggttttccccatttcatggtgtgtggcagctgtaatgtgatcacacaagtttcaaatttgaaaaatgttttaaagatatatttggtatgcaattcgtgtaattgcaaaaaaggcattccaaagtaaatttatgacttcacaaattttgtatgacttcacaagttttggattagggaggtatggctgcagcatcctaaaacaatataaggttgggtattcttccatgaaacttgttattttttccataaagttagattctttctagagcagaaagaactttaatgattgggaatctggagttaagggaaaaaaagatgattaaaagtttaattgttcatctgaagagttgatttttttattcctgtaataaagggtacttttagcagtctctgctcatcttgcccatccggctctttttgtggttgtgtaaggttataacttctgtgtctcagtaaacttgtgcatgcccatttttttctctgttactaccttttctcttattttgttttattattttgatgtaaaattacctgttaattttatttgaaatgagaaattttaaggttcacattattcaaattctgtcagatccctacctctgtcatatggtttataatgtgctgggtattttcagacctgcttattaaaaagatgtaaaacaaaataatgatcactcctgtggatttttcctttatttttgagatgtctcctttggctgcattacttcttcaccccttgcccattgatcagaggaggggtcttaactatgggtgaaccctatatcttactgaagaggttatgttacatgtatattttcataatataacttacatttacatagtacttttatttttagcatacctttttttattaatcctaataatatcactgtaagttatgttgaagcagattgtaagtgttcatttacaaattgtgaaatgaattaaaatgaaagggcaaagattaaatcatgaccaggcctgaaattaacacacaagactcaatttttttcaaccaaagacttttgtaggtgatccctgcctgcaggactccccttcctcctcagatgtcattggattgtaccaggtttactgtagattctagccgttgtagaactaactagatctaagatgagtcccctgatttcctttggtagagtcttccaattgctgaactccaatattgtcgtgactagccagtgttacaacctgtctgccttattttgtgtaatggatttcatattacagaggcatttttttaatgtcaagatgtttaagtattgcttaagtgcaaactacttaatactttttagctattaagtaattaagataggcaggattttatttgttccaaaatgatttgacctaaactaaaaagagaatgtggatctcctgaatcttacttggttaatcttaatataactcctagcattctataattcttcctaaagtcctcttacctggctatcttttgtatcttctttgtctctcctcttctttcccagtcataataactgccagactctgcttcatttctctttgacagtctctactcctaaggtcatccattctctttaggtatcttttggcctcagtttgagcacagcagatcccaagaccacatatgccatagcataggctattatagtcaaccttttgaataaatgtgattgaactttatgttagtaattcttatttaccatcttcctatcaaaaaggcttaaagtcttcatttaatgctctccttcatgtccattttgttaaatgattgccttttaatgacatcttagaacttcagaactatttcaccatggaggatgtgtaagattagccttttatcaaataaaaagtgtgaaatggaatatgtaatctcattaatccattctggctctaaaattctgtgactatcagataaaattcagaaataaaatagtattactaatataaataaatttttatcataattatatttcctaagttttgcctgtaagaatgggtaaaatatctttaaaaccttgaagaaattattacttgatagaaagtttaatccatctgtgagaaggcaaatgtattcagacacaactaaagttctctcttctattttaatttcatttatcttgaactaagactccactgtttcatcctcttagatgctgctacttgaacaatattgttttgagaccaaaaactagcatattaacacaattcttcttaaacgtcttaagagttttgtttcctttacccctttctttaaaaacaagcagccactaaattttttagtagtgaatttcaaaatcctttttaaccttataggtccaagggtagccaaggatggctgcagcttcatatgatcagttgttaaagcaagttgaggcactgaagatggagaactcaaatcttcgacaagagctagaagataattccaatcatcttacaaaactggaaactgaggcatctaatatgaaggtatcaagactgtgacttttaattgtagtttatccatttttattcagtattccctcttgtaaacttgaggtaagacactttacttaaaagtgtattttaaattaagcaataatatgtaaactctttcttgcaaaagttagcatttatatttttaaataagatatattgaattcattcagtgaatcatataaagaaaataagtgtaaaactccaatggctagttagttcttagttctttttaagattaaagagaagagaccaaatatagcatcactgtactgaggcaaggttttctgtgtagttcatagaaactagcctcatgattttagaatatgccttgaatattaagtgtagccttcctccccaactccctcagatcttgccaccccttaagtgctgcagtgataggtgatcaagaaaatcaggataccctactgggaagagccatgaactgaaagtcagtacctggttctatccctggctttcccacaaactgagctatatgacctctgtatattcttcagaacttaagttgtcttatttggcaagtacaggcatcacactagtctagatgatttccatggcaccttcaagccctaaaattggcttgccaaatagtactgaaaagttctgatcacctccaagacaggttagaaaatcgtctatagtggggaaaatgttctggtttcaaaataattgaggttaaaactttagccattttaattcccacttaggcagattctcttctgactgaatttaataacttcatagaattggacattatcaacaaaaatattacttccaccgggtgtgatggctcaggcctgtaatcccagctcttagtgaggcagaggcaggaggatagcttgagccaaggagctcgagacctgcctgggcaatatagcaagaccccattctcaaaaaaaaaaaaaaattacttcctttataaaaaaaaaaatcttcctgctttgtgttgtttctccctcttggctattttaacatttgagttcctggtccagttcttcctgtctgttcactactcttattccttactaatttcctattctatcctagtttttttcctatgcatttcaaggtttcccttattctccagacttttgtgtgtcactgaggtaactgtttctgcttctcttttaccctttatattcagtatcatcacagctcaacctttgctcatgtgtcctattctctttttccatccctctatcaatcttttctactctaattagcctcttctgtggtaaaactgtccccagcaatgacagacatccaatatacctacttcaaatcccttgggaaataaggtagactataaacaaacattttattctttccacaaactatgggtgacctaaaaagacttgcattagttgcctaacaggttaaaaaagagtagtttggtattttaacattgatcaacacattacatttcaaatcattatacttggcatgtgtttttaaaagttttaaaatacagaattaaaatattctttcatctactttagtatggtatatttcgcagagaactcctcctggcaggcctgtttagatagtacatgtctgttttgtagtgtagaactctgagatctcttttttaaagtttgtttaattccttaagcaattcaaaactcatatttgagagacaatgtaacttacccttagatccatctccacactgaagtggaatgtctctcagagtgacaatagaagtcacaccctcaaatttctacagtggaatatctagttgatcatttatatgtgtggtataatacaagttgagtatcccttacccaaaattgcttcaggccagaagtgttttggattttatattttttcagatttttaaatacttgtattatacttcttgagcattcctaattcgaaaatccaaaatctgaaatgctccattgagcatttcgtttgagtgtcatgttggtgctcagaaagctcaagactttggagcatttcagacttcaaattttcggatttagaatgctcaacctatatacatcaggaatagtggcacttcagatatacctgaaaccaaccataaattttattttactcagcatgtgcttcaacagacatcttgtgaatccattaacatatttccttagaattggacatgtggtaccataacaattacagccctgtaatgaaattatatctctttttaaggttttatgctgtgaaagagcataaaccatgagctatttattttgtcttagaatattgttttgtgtagacacttttgaaaccattggcacttcctactgtggattaaaattaatccacacaatggttatttctcccaaaatcacttgctagactttgtaataccttatataaactcgaatcacgtttcctgttcattaatctctttacccccaaaaaaggcaaaaggaggctgggcaccgtggctcatacctataatcctagcactttcggaggccaagcagaaagattgtttgagctcaggaatttgagaccagcctgggcaacatggcaagactctgtttctgcaaaaaaatacaaaaattagccaggtgtggcgtatatctgtggtcccagctacttggaaggctgaggtgggaagattgtactccagcctgggcaaaagagccagacctggtctgtctgaaaaacaaaaacaaaaacaaaacaaaaaacagcaaaaagtaggtctcctccaaccggattacttaaagtctaaaatttatgtagtagtaccatctagtggcaaaagaggacactgctttgctatttgattatatgtgtctttgtagcagccagggaaataagtgtttatgggttagggaaatgtgaacactgtatattaaggaaatatttatttttaagtataatgatattattgtgtttgtgtttagaaagaatccttgtttaaatatacatattgaaatatttacaaagaagttgtatgatgcctgagctttattttaaaaataagtctgaggcagaggggtggaaatagaggaagtggatatgggtgtagatgagataaaactgaccatgaattgataattattgatgtgggatatgaaggtacatggggctttgttataattttctgcatacttaggtatatgtttgaaattttttgtaatgaaaataaaatagagattacatggaatttagatgatatgaaatcagataaatgcagaattatagctaatcttaaaaaaagttgtgtagtgtattttttactccatggctagagccctccccccaacttgttttttttgtttgtttgttttttgttttttgttttttgttttgagacgaagtctcacactgtcgcctgggctctggtgtgcagtggggcaatctcggcttgctgcagcctccgcctcccgggttcaagcggttctcctgcctcagcttcccaagtagctgggactacgggtgtgcaccaccacgcccggctaatttttatatttttagtacagacggggtttcactatgttggctaggctggtctcgaactcctgacctcgtgatccaccgcctcggcctcccaaagtgctgggattacaggcatgagccaccacgcctggccccctccccacaacttttttttagatggagtttcgttcttgtcgcccaggctggagtgcagtggcacaattttggctcactgcagcctccacctcctgggctcccagagtagctgggattacaggtccctaccgccacgcccggctaatttttgtattttagtagagacggagttttgccatgtttgccaggctggtctcaaactcctgacctcaggtgatccacccgcctcggcctctcaaagtactggaattacaggcatgagtcaccgcacccagcctacctagagctctttaattgactttaaaatactgagtatagcaacaaggtaaatatggcattttagagataaaaagctgaaagatggcatggtgtaggaagaattatctataggcaagttattgaagcatttacatctttgttgtagtttgacaaaatttaatatttataaattggtctataaactgtaaaacaatatacatgtaaagtatatcttttcagaaagtaaggaaaaaccgagatcaacatttcagaatgtattttgaagatgtaattatcaagtgtacttatatctggtaatgaaaagcatctttaattatgatatactgaaataaataaaagtgggtcaagtagcagcctccctgaaatgacaaagttgctcatagataaatatcactggtataaccacagcagatttcatttctaatgaataattttctttctttctttctttcttttttttttttttttttttgagaccgagtcttgctctgtcaccaggctggagtgcagtgacatgatcttggctgtctgcaacctccgcctcccgggttcaagctaatctcctgcctcagcctcccgagtagctgggactacaggcgtgcaccaccacgcccagctaatttttgtatttttagtagagatggggtttcgccatgttagccaggatgttctcaatttcttgaccttgtgatcctcctgcctcggcctccaaagtgctgggattacaggcgtgagccaccgtgcccagcctaatgaataattttctaatgtttctaaaatgttaaaatacttctaagacaatgtgtgattatatagtgtaattaatcttttaaaactgagcttccagaattttaaaatacaaatgaatattctctccttcaaaattacatatgtatttaaaagctgccacttctcaaagaactttttgaaacatttttttttggaactgctttgcaattgtattccattttcttttaaaaactcttcaaaatcaagggcctcttctaggttgtatgcagtatgcagcccccaagaaatctgtcccactcaaaaactagaaaacactggataaaatacaaaaatcatacttttaaggacactggaggactgtggaatcatcaagctctttattaactataattcttaggaagaaagaaccctttctagataagctgagattactggtaattttcttcctggggtatattgattctgggtacagattgagattcatcattggcacaagcaggaggacttcactgggagaaagaaactcttgaggactttctgcaggactaggtatgaaagaaaatgaaatcgttggcagccttgacaaacatgagggcagatgtagagatactagcatttagaggagctctaaatgcatggctcatttttaccatgagatattggccgagtcttgtagtgcaggagacttgggatagactagaaacgcagaatgttagcaggcgaagtcctgctagagggagagacatgttactttcataccacaggtctcctcaagtcatttgccagattttaaattttgtagagcaggagattaaagacctgagtttacaacctccaagagaaacaacatttaaggctagagagttaagtgctaccagagaataaggctgaactggaaaggcaaagtgaaatatcccatattcctgcaatgtttaggaaagacctattagagggagacctacctagtatatcaaacatgactggttttccattcaagataaatgtcagattttgatactgtatagggtaagaagttaactgctgaggagatggagaactttcatattttctatctgaatatagagagacacactcaaggaactgggaaaaccaaaccagttagttgtgaacttaaaattgcaactaggtctcaatccattttttttttttttcaagacagagtctcgctctgtcgcccagtctggagtgcagtggcacagtcttggctcactacaagctccacctcccaggttcacaccattcttctgcctcagcctcccaagtagctgggactacaggcacctgccaccatgcctggctaattttttgtatttttagtagagacggggtttcactgtgttagccaggatggtcttgatctcctgacctcgtgatccacctgactcggcctcccaaagtgctgagattacaggtgtgagccaccacccccagcgggtcccaatccatttttagttgctaattggattgaggagatcagaccccaacaatggaaaaggcagactctctagaggaaaatactatcaatcatcttaagtctcttttgttcttgtatacacagttggcatacagtcaaacgttatatgaaatgcagagaaactggaagattactgataatcaagggaacaaataggtaataggagcaaactcagatgatccacatgttgcagttagtagtcaaggattttaacataagtattataaatgtcttgaaaaaaagaaaaatgaacagatagaaaattttgacagagaattggagtctataattaaaaggaatcaaatagatattctagaactgaaaaatatatttgaaattaacattggatgggcttaacagcaggctgaacactgaattagtgaactagtgagaagacagaattagtgaacttgaaaaaagatcagtagaaaatattcaaactgaagcacagagaaaaaaatggaaaaaacaaaaaagacaaaacaatggcttctagaagaaaacataggtaatagcttcttgtcctgggagtaggcaaagatgtcttaaacagaatgccaaagcaccatatatagaaagaaatttgatagacctcattaaaactaagaactcttgttcatcaaaagactcgagtgtgcttctagaagaaaacataggataatcttatctatgtggccttgggtgggcaaaatttcttaggacacacaaaagactaaacataaaaatgtataagataaacttcatcaaaattaaaaacctgtgcttttcagaagacttcattaagaaaatgaaaaagtaagccatagaggagaaaatatttgcaatacatatatctgaccaaaggctcagttcagaatatattaagtaattccttcagaatatataaatcccacaaaccagtaacaaaaagacaatccagtttttaaaatgtgacccagggacttgaaaagacaattcaaaaagaaagataaatggcagataagtccatgaaaagggattcagcatcatttggcatcagggaaatgcaaagactatttcactcctactcaaatgactgatgtttaaaagactgatcacaccaaatgtggagcattggaatgctcaggcattgctgagagaagtattaaaaaccattttggcagtttcctttaaaattaaaccctatgactcagtgtttgcactcctagaaatgtactcaagagaagtgagggcaagtgtccactaaacggtacaagaatgttcatagtgacattctaaataatagcctgcagactggtaacagcccagatgcccctttaagaggagaaaggatagataaattgggctgtatttatacagtggactgctacatactatacaacatttaaaaacaatgaactgataaggcaacagcatggacagatttcacagatactatgttgaacaaaaaaagtgagacacaaaatacttatgtactgtgtgattccatttatatgaaggtcaagagcatgccaaactcttctgataaagaagccagaatagtggttacctctaggaaatgaagattggtaaaaggagcttgagggaaccctctggggtgctagaaatgtattttcacctagatagtgattacatgggtgtgaaaattcactggatatttaggattagtgtattttacatatgtgtgttgtgcctcaataaaacaggaaaaaaattacttgaggtcagtttttattgtggaatagccataaactgttcacagcaaactagtaaataatgtaggtcatattggatggtatcatcttaaggcaaagtaactggatgtgactgtaaatttacacagattttgttgatgaggttcataactcaaagcacttacaaaagtaatttaacacatcattggagtaagttagtagctttccaaggtgactactttgggaatctttttaaaaattgtttgaccttaaatcttatttacctttatgcttatagctatcaatagatttctaacaatgtgtacagaaatttttaaaaatagaactttattacaagttgagtatattcactattttattaaattaggaagtgtggacaaaaaaaatcaaaatcaactatttttttttaaatttaaatcccatcaccagaggtaaaagtaacctttgatagtatatatatatattcttttctctatacatttatgcaaacttgcatttgatgacatcatattttgcaggttttttttttctgtgtaatttattgtcatcttacgtcagattatgtattttacagttgcatagtattccattgtaggtacagctaaaaaatgctatggtttatttaatacttattgttggacatctgaatttatatggctttttaatttctttttttagtattttaagtttttattatttctttttaaaaagaccattaatgtaccattagttttgaaaaaattagatgtatgtccaatgatgtacgaaggattttttatttttaaacttttaaatctttgtaacttttctaaaaacaagtaggattttttctaatacatattgtttaaaaagtatgacacaacaagtaaaaaagaaattgcttgtaatttcagtctccatagaataacactgttaacattttaatgattctgctttcagcatcagcttcacctgagaacttgttcaaaatgcagattttcagcctctaccccaggcttactgaatcgacagtctatgttttaacaaggtcttcaggtgattctgatccatgctgacgcttgagaacactactgtaggctttggagaagaatcttacaaagagagacctgatcggccgggcgcggtggctcacgcctgtaatcccagcactttgggaggctgacgcgggcggatggtgatgtcaggagatcgagaccatcctggctaacacggtgaaaccccgtctctactatactaaaaaaaaaaaaaaaaaattagccgggcgtggtggcgggagcctgtagtcccagctactggggaggctgaggcaggagaatggcgtgaacttgggaggcggagctttcagtgagccgagattgcgccactgctctccagcctgggcgacagagcgagactccgtctcaaaaaaaaaaaaaaaaaagagacctgatcacagctgtgccttaaaaaggctgctctgacagctctgtgcaaggttgagccacttgggaaattattttcatagtttaggtagggttaataacaagatagtggcagtaagaatatgaaagagatagctgtaagagagctaatagaggtagaatcaccagaaatccataactgggaatgtgaaggaagaggtgctaaggatttgagctggaggagaaagagaaggctaatgccatttaactgagagaatacaaggcaaagaataggctttattggtacaaaatgttagttcagttctggacatttagatgtatggtacctgtcatacagatgtaaagcatccatcagttggttggaaaagtgagtctgaagtttgcaagtgaagttaggattcgagacatgtcattggaaattaactgctcaagggtagttgttgaattgtgagaccggaagcctgagaaataaggataagattaaaaaaggattattgaaggactaaaacagtagcaatggatggaaagagaattggaatcctggaaaaatcacaggtagtctccaatgagagttcttaaatggaagagatggtgccctgaagtttatagtagacattttgatgggcatattcaaattcagtaaaggaagttatcactgagcaaatttgttttctattccacaaatgtaaaacactctggaatattttgaaaataatacagtcaccttcatgcccccacatctacttaccaaagcctttcaaactccaacatagtctattattttgaaggtcagatactaaggctatttattaaaaggaattctggggtttgggggcgatttctttgtttctgtttttttagctgaggtctcactctgtcccccaggctggagtgcagtggtgagactgtggctcactgcagcctcaaacttctgggctcaagtgattctcctgcctcagcctcccaagtagctgggactacaggcacatgccaccactcatggtttttgtttgtttgtttttttaattttgtagggacagagtctcgctatgttgttcaggctggtctcaaactcctggactcaagtgaccttcctgccttagcctcccaaagcgttgaggttacaggcatgagccaccatgaatgcttacaatgtcactgtcaagataaatcagtgaaaccgtctttgctccagtcactcactttttgacaggttttccttttaatgtatttacagattacttttcttataggggaacgttccatttagttacaaagttgcaaatgttcaaatattttgtcttgcattcaggaaacctgattggccaaagaactatgctaggagctagaatggaatgcctcagtaaatggaaaataatataaattattattaagtagcatgcaataagagccaaagttcacaaatgtaatggcagaaaaactggtagaaaatgaaaatttccaacattctttgagaaaaaatgatcaagaaagggattacatgggaaagaagaaaagcatcaaaagtcaagaagtagtgaacatacagtcatttgaatgtatgctaattgtaaattagtatactagcagaatatacttaaatgtggtatataaaagcttgaatgttgaagttgttaaatagattatgtgttaatttggtgttttttatggtcatgttggtgcacgcttaagagacatggattctaaacacataagtagcttttgtaacttgagcaagtctctgggtctcacttgttttatctgaaaaatgagaataatttgcattgttggtttttaggtttgaaataatgaatgtatcttaaatgtgtttctaataccttgcacagagactccccataatcaccattatctcaaaatatcactattattatttggccatgatttatttattaataatgaataataggtaatatatataaggtgcgtgctttgagagtgatctgaatttttttctcagcatacttaaatgtcaagaaatacagaatcatgtcttgaagttatttagaatttcatgttaatatattgtgttctttttaacaggaagtacttaaacaactacaaggaagtattgaagatgaagctatggcttcttctggacagattgatttattagagcgtcttaaaggtagattttaaaaaggtgttttaaaataattttttaagctcaaattgtcatctttaggtgtgtagatccaagtacagcttctctcgatttgggtgttggtatcagttttcttggtatgttagccttaccctcaggatgtaattgttaaagtacaaataaataaaaaatgtatttgtgtgtcatttcttcagttaaacatttaactggctttgaatgaactattttaaatccctcccttaaataattttcggctctttgtaaagcttgttgctattctgccagtcactaaatagggctttagtattctatatgccatagacttgagcctactgtttcattggaagaagtattgtcttcttcattcaggatagaaatactttaaccttttcacatatataagttgattataattcatttttagcagttttaaaaggatatctttctcattctgttgcttgaaaattccagtgtcagaacagagaaagtgcttgataataattgaagccagacagagaaattacttttggattctaaaatattatttagaggaagtctaaggaagtacattttatctaattttcctttaacacactccttatttttaccctgacccaagtggacttttcagggaaagtcctaaataatttttgttttcagtcatgtatatttgtggttaaaatgtaaacctaatatttcactttaaaataatataacattaagaatattttagactgcttaaagcaattgttgtataaaaacttgtttctattttatttagagcttaacttagatagcagtaatttccctggagtaaaactgcggtcaaaaatgtccctccgttcttatggaagccgggaaggatctgtatcaagccgttctggagagtgcagtcctgttcctatgggttcatttccaagaagagggtttgtaaatggaagcagagaaagtactggatatttagaagaacttgagaaagagaggtaacttttcttcatatagtaaacattgccttgtgtactccagtttattgttattttgtaatataatatttaaattgtgaatttatagtaggtgatagctaacacttagagcattttgcatttttaaactcaaagatagcatgttattgattgcacttacattaaatctaaaaatataaacaaggccgtttcctgggattctgaagacctattttgtcacttattttgtttttttgtttgttttttggggtttattttgagacagggtgtcactgtgtctcccaggctggagtgtagtggcatgatctcggctcactgcaacctccacctcctgggttcaagcggttcttgtgcctcagccacccaagtagctgaaactatagacgcctaccaccacgcctggctaatttttgtatttttggtagagacggggtttcttcatgttggccaagctggttatcacttaaatactttgactactctgtacattgagtaatacacataattattatatttatacgtagttaaaatgtgtaacttgccagatactttggcccacacctgtaatcccagctactctggaggctgaggcggtaggattgcttgaggccaggagttcaggactagcctgggtgacatagtaagactctttctttttttttttttttttgagatgcagtttcacttttgttgcccaggctggattgcaatggcacaatctcggctcactgcaacctctgcctcccaggttcaagcgattcttctgcttcagtctcccaagtagctgggattacaggcatgtgccaccacgcctggctaattttatattttgagtagagacagtgtttcaccatgttggtcaggctagtctcaaactcatgaccttaggtgattcccccctgcctcggccttctaaagtgctgggattacaggcatgaggcactacacttggccaagactctgtctctttaccaaaaaaaaaaaaagaaaaaaagtagtaactggatttttattgaatttctgattatctattgaagtatattcagtaactactagattcagtaaaagatgactcttttcattatggaaggcccactacaagtggccacaaatgaaatacttctttttttttttttttttactttataaataataattgtacatttcatggggtacatagtgatgtttctacacatataatttattgcaatcaggttagcatatctgtcatctcagacatttattatttcttcgtgttaggaacattcactgtctaccatctagctatttgaaactatgtaatattgttaactgtgctcatcctatggtagcgtagaacacagccctgtacagtagcgtagaacacagtcctgtacagtagcgtagaacacagtcctgtacagtagcgtagaacacagtcctgtacagtagcgtagaacacagtcctgtacagtagcgtagaacacagtcttatacagtagtgtagaacacagtcctatacagtagtgtagaacactagaacttattcctcctatctagctgtaattttatattctttaacaaatctctctttatctcttctttccctctgtgtttcctagcctctagtatttactttttacttctgttagtaaaaagtaaatttttcttttttttcttcttttttttttttttttttttgagataagagtcttcctgtcgcccaggctagagtgcagtggcgcaatcttggctcctgcaacctccacctcctaggttcaagcaattctcatgtctcagcctcccgggtagctgggattacaggcacgccccaccgcgtccggctaatttttgtatttttagtagagatgggatttcaccatgttggccaggctggtctcgatctcctgacctcaggtgatctgcctgccttggcctcccaaagttttgggattacaggcatgagccactgcgcctggccaacaaaacatttcttaatgtataagttttaatacctgaaaaaaaattgcttgatgtatggaatgagttctgatttttcacagctagtgtattaattcttctcttcctaaagttaacattatctcactgcagataccaaaatatagatcattatcaggaacttcgtcaaatgttttatgtcccctaaaagattccttaatgcacatattaaggaatatctttattatctttatatttctaaaagttctattagacattcagaaaatggtaaaatatataaaagcttcatattatctctgtgaccttggttaagtcattaaatttttgtaccattttcttctgtaagataaagatatggttctactttgtggcattgttgtgaaaattgaatattagtatataggaaatgcccagcatatctccctgagaggcagaagaccttttataactttctctccagtttcatatatgcccatttataaaaatagggataattatctggacgagaaatgatgtttcactgtcttttatttcttaagtttacataagtctctgtttcatacattgatcctagactattgaaacaccatcttgaaaaataaggagtgaacttgggtccataatcttccatctctttttcccctttgagctctattaagaggcagagggcatgcatactaacctttccttacttgctttcttttccttactttgctttatgtaggcaaagtcctgattttattagcagagagagggaatttcagagaaaaatattaatttttgaaataagttttactgcaaatactagtaaacctaacaaatacagctgtaagtggtaaggaatacttgtaataaaaatgttcttagtttctgtcttgacattatttcttgctagtcttccagagttctttgcatctaaatctaggaaaagcttatttctctgttcaaagacttaaatgcaatgatccccatgttttatttattatataataccactgtaagtaactttaagctagtattctgacttttaactccaagtggaaaatacatttctttttaaaaatatttaaaggtgctttagccttttctgttgttactgtagaaaagacgtcttgtttttgttttcgtttttctcccaaaatatggcccaacttctaattcaggctttattacactctataaaaagttgctttatctggagagaaagaggtatcaacatggtgttgttagaaggttctcaactctcactgatcattagtatcactagtttagctttataaagcatcataaatgaaaagtatcagtattcctttgctatgttcagtctcatttcccatgagatagttacttctataactctaaataatatgtttatattgctagtattggacatgacttactgactcaccactctgaaagatgaagatttgttaaattcactcaattatccatccagtttttaattctgtaccaattctttggtcgaatttgtatacatatacacataagcaaatacacatacatatatataagttctatttcttgttctttcctgtgagtgactgtgtctactgaagccccgctgtataagatttggcaactgtgtgtttacctttattttgttaagactgttaacagttacatcatactatatatatttaagtcttcatgtttttttattctgtaaattaagcataatgttgatgtgaaataagtgggtttttttaggactctgtagtcgttggacactgtgagtcagtagtatgccagaattaatttttgctccctattgatagaatatcatactctttgtgctgtttaaaggaagatgatgctatttggactgtgtctttcttatatagctctttgtttttgtctcaagtttctaattgcctttcttttatgttttcgggagcagaaacttgtgcctttatgataatatgaggatctagtttcattttattcataaataaatttttattggagccaatgaatttttctgatctaatttgtaccatttgcttcctgagcctgctacaagactgtcataccactgttgtcattatgcttcccatttaggtctaatatgtttgggtgttcttgactcttgctgtgttggagagagataaattgatttcttgcttgtgtgatagtatacttattttgctctcacacttgattgatagttcaggtaggtttaggttcaaactcatttttcttcattatcaaggtaccaatgagaaatttgataccagtctgaatcttattcctttgtagatggccatttttcctctttggaagcttttgaatgttttggtatgcatattttcctcattcatcatgctgaatatttactgtacccttttgatctggaaatttatttattcagcttttttctgttatattacttctttgatgattttcccctttagttttttctgttctttctttctagaccttcttaaagtcatagtttatatcttcttcctttatctgtactcctcaagataaatgctagaagttggttaagccaggacttaaacccagcttgtagctttataagctgggttttgaacctcagttttctagttagtaaagtgatcatgagaataacgacctcaaaggatatcatgaggattaaattagatttttttaaagtccttagcactatgcccagtacatacagcattcaataatgttaggaattgttgctgtcatgttcactattaatttatttaacaaatatttattgaatgctaatacaaatgtgccatgctcttctaggtgacccccagtaaggtagaggactaagaagacatgagatttatgtgaaaaagcatttttaaagaagaccattggcaatcacaaaataggcctttagtacactaaaccctaatgactctgcctgttctgagtctagccttagtttcagttctgagccttatgaactgctgttgtgtgagtcacaaggtcaactaccataatttaatcacttgctatcattttagctgaagacactataaccttggcttccccagagtattttactacaggttaatcttaaacttgatagtagcaaattgtccctagtgtccctaacctcccccttacttcaacactgccactgacattggcctgtcaatttaagcacttttaatgcccagctcttttttttttttttttttaagacgaaatctcactctgtcacctaggctggagtgcagtggcacgatcttggctcactgcaacctccgcctccctgattcaagagattctcatgcctcagcctcccaagcagctaggactatgagtatctgccacagcgcccagctaatttctgtatttttagtagagacggggtttcaccatgttggccaggctggtctcgaactcctgacttcaagtgatccacctgcctcagcctcccaaagtactgggattacaggcgtgacccgccgtgcctggccccaactcttatttcataagttcatttattaggaagtaatggaggaaatagtagcatcaccatctattttattctttttcccaccttggacctggtaggtcctgcaggtcctcactagggaaaactgaaaaatagaattaaatctcatctttatgggagttgtggtacccagctgtgaatggagttcaggctttctgcagtgctttctcctgttcctgttgtcagaaatcggagggagagagcagcttgtctttagtgtgccttttctgagggatgctacatcataagcaggggcttcctttcttcccaatcagtccatcactattaaggttgccacataagaacaaaagcttatttcttattttttaagttgcttctcagtaaaggaaaatacattttagcaagaacagaaccttccacatactcactactaagattcattcccatatttcctaagaaacaataatcaagcagaacttttaaagtaatagtatcagagtggggaacgtctctctgtatgaccaaactccagaatctgtaatagaaaatatctacaaatcggactgcatggaaatcaaaattttctacatggcaaaacgttacagttgacccttgaacaattcagggattggcgtacccacccactacgtgcagtcaaaaatatatatataacttttgactgcccgaaaactttactgattgcctgtctattgacctgaagccttactgataacataaacagtcaagtaacaaatattttgtatgttatatgtattatatactatgttaagttagagaaaacatgttattaagaaaatcataatgaagtggaagggaattcttgtataagtggacccatgcagttcacacccatattcaagggtcaactgagtaaaaaatgttaaaaagacaagtgtcaagttcagaaaattatatgcagcccaacaactgacaaagcactatcatttttaatatagaaaaggtcctacaaataagaaaaatcacagaaaaggaaatacaaatggtttataaacttgaacaaaatgtttaatctcactcatagtaagagaaatcaaattaaaaccagtgatacaccatttaaaaaaactagacatgaaaaagcaaaaagttgaattaaacacttaaattggtgatgatggtagcatacattggtataacatctcacaagggcagtaagttaaaaatttatatattctaggaatttcttttatataaatgagtgtatatgtattaaatgaggtataggtataaggctattcaatgcagcattgtttataataacaaaagattagaaaagccttaagtaccctccaactaagagttggttgtagtgtatccctacatagatttatgaatactagggaattcttggaatattatgtagctaacaaaaaaaatacctagtatagattgagcatcccaaatctggaaatagaaaattctccaaaatcctaaagtttttgagtaacatgatgctcaaaggaaatgctaattagagcatttttggatttgagatgcccaactggtaagtataatagaaatattccaaaatccaaaaacacttctagtcacaatcattttgaataagggatactcaacctgtgcctatttgtgttctgcaagatcgattttttttttttttttttttggaaaggagtccattgcccaggctggaatgcagtggtatgatctcagctcactgcagccttggcctcctgggctcaagtgattctcccagctcaacctcccaagtagctgggactacaggtatgcaccaccacacctggctagtttttgtatttttttgtagagatgggattttggggtttgggttttcatcatgttgcccaggctggtattgaactcctgagctcaagtgatccacctgcctcggcttccctaagtattggcattacaggcatgtgccaccacacctggcccccaggatcaatttttaagtgaaaaaaagttgcaggacaacatacactataataatatgctacaatttatatttaaaatgtacatataagtatgcacatatgtccttgtatttttatagaatagctctagaagtatacctaagaaaattataacagtggtagctctggcaaagagccacgtgaaaagagataaattatatactttttgtacctcttgagttttatccctgtaacactcttactgtgcatttatgtttataatgctcaggtatacagtttcttagtacagattgctatggagaacaccatcatttggtgttcagattccaaactaagaagtttttctccgtcataacttcctcttatttcaaaatgacagtatatttcttattattttggctgctgtgaagctgaaagccacatcagtgtccaaagtaatagcttcttatattctgggtttgttttctgggcatcattgctgcttttcttatttcctttactatactttttattcttatattaattttgagttttgttatatgtgtatcttttacctatcattatattcttagactataaatatgaagaaagcctttggtgaagtgtaagtattcttttaaggatgattaccagtttatttagaaaaaaagttctttttaatactctaattttaatgactgtaatattctaagtcctacctttaaaaattgaaatcaatgtaaattttttgagtaattcattattagcactttaggtagagaagtttgcaataacaactgatgtaagtattgctcttctgcagtctttattagcattgtttaaacgtacctttttttaaaaaaaaaaaaataggtcattgcttcttgctgatcttgacaaagaagaaaaggaaaaagactggtattacgctcaacttcagaatctcactaaaagaatagatagtcttcctttaactgaaaatgtaagtaacttggcagtacaacttatttgaaactttaataacttgatattttaaagtacctaggtaatccattaaaattcaggataactgaatttatagttatttgtaaattgcaatatgttttacccaactttaggcctgaatatataatagttaatgaatttttgttggtaaagatgataaaactttattgtgctcaaatgttttatttaaagctcttatttagaaaatctataaagtttgaattctagaggacctcagggttcaactaggcaactagttttttaactccgtgtattgaattgccaaacatactctatagaaatatttatcaccatctgcctattttttgtactgtgttgcaggaatcatgccaaatagtttttgcaataaaaatatctctgaaaatattctagatataaatgccaatagctatagcacggatattagcatttttgcaagcactaaagctggtttgttttgtccaccagtattcacaataaattaacagtatgcagttgaataacattctgatttactacaaagggttatttttcttggcctctgctgaaccagtaaaacatatactgaaaagatcgaacctgcatataatgaatgtgttggagtaaagaaaaaacatgcaagtcaatagtttagattacagaagtttgttcaccgatttatgacagcaggtcctaaactgccaacatctctaaccatctgattaggtttccatgagccaagtcttagatattccatgaatcataaccttttagtcagtgtaacacagggatttcaactttttgttaagaaatgactcaacatggtggaggcttatgcctgtaaccccagcactttgggaggctgagaaaggtggatcacttaaggccaggagttcgagaccagcctggtcaacatggtgaaactctgtctctactaaagtaaatacaaaaattagccagacatggtggtgcatgcctgtaatctcagctacttgggaggctgaggcaggaaaagcacttgaacctgggaggcagaggttgcaatgatccaagttcatgccactgcactccatccagcctgggtgacagagcaagactccatctcaaaacaaaaagaaaaaataaaaaaaaaaataaatgactcactagaggaatctttaagtgtccatttaactgtcttgtttagctaattaaaatacactaggatttgtctggtttcctcatctggatgttgctagcaatggtaacatttttcattttagaaattttgcaaaccattgcatttatagatatgaattctgatatggctgctttaaaattatccaatttaaattgtccaattaaaatcattcatttaacttgaaatgtatgacttaaggaaatttttcaatttaacttgaagtgatttatttttcttagattgttcagaatgatggcatttcagaaacattggattacctgtgatttttgttttggtaaatgtttaaaaacaataaaaaaggaaaacatttacgtgtgcattttctttatacacacacacacacgaaaaaaaaacaagtaagaaacccagaatggtccttaggcatatgagaacagaagttctgattgagtaatggctatggaaatttcccctaatatatttagaaaagctgttctctcatgcagtggatataatataccatggtatctaatttttctttctgatgaaggaagcaactacagaaagcttttatttatttgttcaaagtgaccagtgcaattaatgcaaaagaaaatccacagcaactctcccaatactactttcaaaacaaacataccaaacttgattttcattaaaatgtagttatttcttcacactagtaaatcaaaaaccaagacccatataaaacagggcgaacaattactgtgcttcatcttctggacaagaatgccaagttagtttctcttttataagcaattacattttgaggacccttcatatttgcctcttttgccagcagcaactctgcctaatctgaatccttccatttcatgagaaacagcagttctccactgctgtctgtggcaccaattactccttcaggatcaagacatctggcaaagccttttagtttgtcagcagcatcccttctcttctttgatttactgtcatcagattcactgtcagataaagattttctgtttgtgccatctttttcttgactagttttttgagaattaagaaatgcttcaattaaccctgaaccatctaaattttctttaggttcccaagtgttgtcaacatctgtaaatcccttccgcttaaggaaatatcccactttcctattcactacacgtcagtctagtacattttccatcacagattcttccggctctgcctcttcatcttttttactctttccattctgtttgtttcctattttttgcaatgtagttttattggaggccattttttattgcagacttgaggagctgatattcaccacctccaagctgctctgggttataggtctgcagtgttctgtaaaaaaaaaattctaatcctgtcagcctctccctctccatgtcaatgattttattcatgggatggcacatataagaatatttctcaaatacatttatagtggctgcgtcagcagcacatatcctaaaactggaatgaggcagaggagtttagcatggcccttgctcaaggatgacatggaaattgatgaagtattctatatttaaaaaaaaaaaaaaagaaaattatataatctcaaacaagactacatattttagctattatccataaatatttcacgtaacttattttttttttttttgagatggagtctcgctctgtcgcccaggctggaatgcagtggcgcaatctcagctcactgcaacctctgactcccaggttcaagcgattctcctgcctcagcctcccaagtagctgggactacagcatgccaccatgtccagctaattttttgtacttttagtagagacaaggttttgatgtgttagccaggatgttcttgatatcctgacctcgtgatccacccaccttggtctcccaaagtgttgggattacaggtgtgagccactgcgcccagccacatgtaattttttaaaagaaaatagactaattaaaatataacgtactctcttagcttagatttttcattttctactactactttgagagaccaaaatagacaaaaaggtaaaaactgaaagagagaaaaccgttttgaaaacatgtagctagccaggtttcctgagtggacgttggctgacaggaggtggaactggaagcttaagtgctcattctcctagaataatcattcagggttttgagagagaaaggatccctttttctgagagggcccttaacatgttaacacttaacagtgctcctgggaattaaggagcacagataatgagagaacagttattgttagcctgtgaggattaggaattttgggggatttgttgggactataacttatgaagaaaaataccaaagtgtagttttgcttaccgttaattttggtcattagagaatatacaaaaatccagaatcccactgtctacatgaagtcaggttcaggaaagagcttaaatgtacatgacaactcaagagtatttggttactatctgaaacaaagatcagttgtcaagttaattattctctactaatttattaagtagatcacatttatttaatatgatatataagacattatcaggcaccattggcaacatcagcaaatttaaactctgcttgtattttataagtattttttattttcacaaattttgcatttatgttgggaagccaagctaatgaacactttatgtggaaatacctacttatcaaaacattactgaaaacatcagatctaaaccacattattgcaacatactgtgtcatgttcaattttttttttttgcagagagggtttgggaagtggaggactaataagtggagttacaactggctcagtaggaataagaaataacatgcagactatttcatctctattgcaacccataatttgggtatgcctaagggaatgcattctgcatatgaatgtcatctgtatgttgcaaagggaaaagggtgagaactaatctaactacaactgacaacacaatttggagttcttggaccagaatgccattctgagtcagatatatgtcatatacagttttctaagggcacacagaaaatctataacattgcctgattcccttcatggcccattataagtctgttacctatcattttatttaatcagcttttattgccttttgggcatgggtttatatgtttcattaccttgtccttttaaaatcctgttgcatgcttggcagttatcacagtccttggaattttaattaaagggttaataaatttttgaatgagttattacccattctgaagaagtacctctttttgtttcaactttgctttacttttgaatttttaccaaagtctgtgttgactttatctactctatttatgattatctttcttacatgtaggctttttcttgtcccatattcctcatttgattaatgaaaaagttctctcaacttaatctgtatgtatatggtaatccttaccttaagttgaagtatgagcttaagaatgatggacttgtttcttgatatttctatgttgtccacgttaatatgctagtatttaataattaaaagtagtgcctcttcagtagagaagagtcataaggcaactgaatttaacctcactctaactggaccaattatatattttaagtgaaataggccaatctaattaaagccacttgtgactttggcaaataagtgtttgaattccacgtcacatcagggatccagattgagtctgacacctataatcaaatttaaacactccttggagtaaaaaataattttctcatgcaccatgactgacgtatttgcttattcattttctttattggttcttatatgcttttttgcttttactgattaacgtaaatacaagatattgatacttttttattatttgtggttttagttttccttacaaacagatatgaccagaaggcaattggaatatgaagcaaggcaaatcagagttgcgatggaagaacaactaggtacctgccaggatatggaaaaacgagcacaggtaagttacttgtttctaagtgataaaacagcgaagagctattaggaataaaatgaattacagctctgttaatattgattaaattttattaaagacataaggctgtgtttattttggctctatttcaaaataagatttatcatggctgctgagcaacataatcaatattcacatagttgtgtctttaccatattcatttcccctggtactgttctgttctgccttggaattataagggagagacagagttagatggtggtcttccggtagctaatgactagcttcagttctcctttgaaatttttacttcttgtaatcttagactgtataaaggcattcagaacatgtcactgctcttcaaattgtgcacttaaaaaaccctcattcaaggataataggaaggaaacaaagagaattttaggagagatgaagtaagttgtatggagaacattcccatatttctaccctcaatgtcaagaaagagtattagctagctttgctattaagtatttttatatattattgaatatagcctttttatattcaaacaagtttatgactgactaatgttttaaagccctgaagaggccttgccaattgccttatctgtttcaaaactagcgtgggttgttgttttcttttttaacttttgggacaaattgggaggaaaacatttaaagattttctttaagtaaatatagcaaataaaagcagagaccaacatttacatggtagtgatacacatacattttgtattctataaaacatattaaatagttttaaaatggctactgtaggatattttacattccttgaagtatagtctttattttttttgtgacacttcctaaacataatgatttttttttttttttcttgagtctcaccctgttgcccaggctgaagtgcaatggcatgatctcacctgcaacttccgcctcctgggctcaagcaatgctcctgcctcagccacctgagtagctgggattacaggcgtgcgccaccatgcccagctagtttttgtttcgccatgtttgccaggctggtcttgaactgctgacctcaagtgatccaccggcctcagcctcccaaagtgctaggatttagagtcatcatgcccagtgtattagtttgttttcaggcttctgataaatacatacccgagactgggcagtttacaaaagaaagaggtttaagggacttaacagttctacgtggctggggaatcctcacaatcatggtggaaggcaaggaggaacaagtcatgtcttacatgggtggcagcaggcaaagagagagagactgacagggaaactcccatttttaaaaccatcagatctcgtgagaattatttactatcacaagaacagcacaggagagacccacccccataatttaattatctcccactgggtccctcccacaacacatgggagctgcaagatgagatttgggtggggacacagccaaaccatatcacccagcctaaacataatgtatattctatctgttttggagtatggtggaaggctaaggtgctactaaaacaccagtaccatactacatttcatagtccatacatgttagtttcatagtgaaggttaagatcataatgaggttgggggcttaactagtgtttgtgtgcatgtgcatgtatgtgtacatgttagttataatacgtgtatatatcattttttcttaccttccctcttgcccctatcccagtcagaaagattcgtgacttaaatgtcaaaagtaaaactttaaacctttcagtagaaaatatacataagtatgtttctgatattagagtaggaaagtatttcttaagaaagacttaaaacgctaatgataaaagaccaataagtttactgtattaaaattaagaatttatcttcaacaggtacctgaaagaaagtgaaaagataacttacaaattgggagaagatatttattaccatataactggcaaagaactaaaatcaagaatatataaataacttctaaaaatacattgcattttacatttagatttaaattttagattttcatggaattattttaaaatgttaggtttatttgtttcaaaaaaacaagtattactttggtttatatgaatttgcatttttagaacatgaatatatgggatactgtagacataagttagtttttctgtgtctgttaatgtgagcttttttttagagagagagatcctaaaagaacaagatgtgatggtagttgtaaaaattcttgtgctatataaatataagtaggtgtattccagacattttatatccctgaggagaggttaacttgagttctttcttggccattttgttcacataagcgctgatactgtcattcttactttattctggaatgccgtatccttcattttggtagttaatattctaaggaaattttattctgtattttgagaaacatacgtgttcatttattctggaaatagttatatgaaggttaaggttaaagaaattgtaaacaagataaaaaggcaaataatggaaatgttggtagaatatataagagatttaatatccctactctacaaggatcacctacaaatcaattgaaaatggtcaaccatgccaggcatggtgattcacacctgtaattctagcactttgagaggctgaggcagaaggatcacttgagcccaggagttcgagaccagcctgagcaagatagcaagaccctgcctctaccaaaaaaaaaaaaaaaaaagctgagtatgatggtgcacatctgtagacctagttacttgggaggctgaggctgaggaggatcccttgagcccaggagttcaaggctgcagtgagctacaatctcaccactgcactcaaaaaaaaaaaaaaaaaaagagaaagaaaggaaagaaaagaaaagaaagaaaacagataaccaaatagcaaaatagtcagaagatgtgaatagttccatcagaaaattaagttcaagtgtctaataaacaattgtgaaaagatgcttaaacatcactacacatcagggaaatgtaatataaagtaaggtactattttttttttgcctatcagctgcccgaaactttataatttttgatgacatgcagtattagcaagggtgtgaaagtaaaaacatcatctacctttaaatcttttttgtttgctttgttttttctttttgagacacagtcttgctctgtcacacaggctggagtgcagtggtttgatttcgccttactgcaacccccacctcctggcttcaagcgattctcatgcctgagcctcctgagtagctgggactatagttgtgtgccaccacgcccagctaatttttgtatttttagtagaaacagggtttcaccatattggtcaggctggtcttgaactcttggcctcaagtgatctgcctgccttgacctcccaaagtgctgggattacaggcatgagccactgcacccagccaacattgtctgccctgttcttttaagaataaattgatacatttttggaggacaatttggcattatttgccaaaattaaaatgcctgtgctctatgaccgtgtgtttctataggacttctaggaatatgttgcgtacagaaatacttactttagggcagaatgtagatacatattttaaattattaaatgaatagtatgcaagctattataaaataccatactgagaatagtgggaatatggtagccaaagcactcctttccctcctaactccctgcttgggtgattcagcaagtgaaacaagaacggccctggaagaggagatctcaggagggtctgaggctatgagaaaaaatatgggatctcatttgcaaggggaaggagtaaataagaattccaaataaaataagaatagaatgaaagtttttaaacataagtattaccacaaaccagaagcaaaccttatattaagaaaatagtgactgagtgaaatagctcaggcctgtaatcccagcactttgggaggctgacgcaagaggatcacaagttagcagtagtgttggcacacaactgtaatcccagctgccttaaggaatgctgaggtggtaggattgcttgagcttaggaattagaggttgcagtgagctatgatcatgccactgcactccaacctgggtgaccgagcaagaccctgtcttgaaaaagaaaacagaaataatgaggtaatcattgttgctatcattaatatgtttgagtagcttgccgtcatcactattatttaactttgtttgacaggcttgactaatgcaagtagaaaaaacaaaataagtgttatgaatcctacactatttttgaactagaaaggaagagattaaataattatttgtaaatgatgtggtggtttgcctagaaaagctatacaaaatgaactaaaaagtatttaaactagtaagagaatttagtaaggtaactcaagttaagatacatacaaaaatcagcaataactaccagttaaaggtggaaatgggggtaggaggacctgttcacagtaacaggaaactttaaagtaactagaaaaagcctgcataaagaaaaacataaaattgttgaaggacactaaattttttggaacctagaaaaatgattataaagtttataatgcaagaatttccaaaaacatttatgaaagaacgcataattgaagatttaccttaccatttgttaaaatctattgtgaagatgttgtaataatcacagtatgataatagcacaggaataaatttaggcaaatgatagagactagaaagaggtacaggaatatttacaacctttatatgacagaagttacattataaattttggagaaattgataaattactcaataaattatataggtacaaccaatgacctgttcagaagatgagaaattaaacccttacctcacatcttaagaaaagttataggttgattagctattcaaatgtgaaaaataaatctaaaattaatagaataaaatacaggcaagagatcttcttaaatatgaatggaaactcaaaagcaataaagaggaaggaaagttgggatttatctcataacattttaaatcattcattgcacaaaagataaattagaaaaatacttataacacataaaggggaaaatggtaatatctctaaaatataagaattcctacaaatgaataagaaaaagacaaccctgtgtttttgttttgttcagagagggggttttgctggttgcccaggctgtagtgcagtggccattcacaggagcaatcataatacactacagcctcaaacggctctagcaaccctccttcctcagcctcccacatagttgggactttaggcgtgtacatcgcacctgcctaacccatgttttttaatggacagaggatgtaataaggcagttcattaaaaagatggcaaatgaccagtaaaacacagatgactagtaaataatttaggaaaactcaaaatccacttgtgcctacctatgtgagattgttagtctccaggtacctcttaactgcatggttatttatttactcttacttgttcagtgtgtatttggtcacctagtatggtggtacttacccttccataggcatgtaagcaaaggttggaaaagtgcacatcagtttgttaatagagcttactactgggatgtgggaattggtggggtgaaggtgtaagtacacctctatattgccataattgatgatactgtttaatgtagtttatctcctccctagttgatggacacttaagttgattctaatttttcagttaaaaacagcacatgtaccctaaaacttaaagtattaaaaaagaaaacagctctgataaacatacttattcatgtcttgtaaacaaacatgcaagagtttctctaggtgaggagtcagcaatctttttcttagaaggccacatagtaaatatttaggttttgtggaccatatggtctcttttgcaactactcaaccctgcctttttctttttctttttttttttttttttttgagtcagagtcttactctgtcacctaggctggagtacagtcatgcaattttgtctcactgcaacctccgcctctaaggttcaaacgattcttgtgcctcaggctcccaagtagctggaattacaggcatgtgccaccacgcctggctaatttttgtatttttagtagagacggggtttcactatgttgcccagtctggcctcgaactcctgacctcaggtgatccacctgcctcagcctcccaaaatgttgagattacaggcgtgagccaccactctcggcctcaaccgtgccttttaacaagaaagcaaccatagataatttatgaacacaaatgggcatggctgtgtttcagtaaaacttaatttataaaaacagatggcttagtaggccctagtttgctgactgttgccctagcatatatatctaaaagcataattactggtcataaggtatgagtgttttgaatgagtgtttgccaaattgctcttaaagtaatctttttagtttacattcctaatagtagtatgtgacaattcttgtttctgtatgtcttctccatcacttgtgagtcagaatttatcattaacaatcagtgggtagtgaaacattttgtcatcttaaactttgtattttcctgagctactgaagttgaatctcgaaaatatttattagattttggggttttctttctaagttacttcctcatatcccttgctcattccctactgttaaatgtcttgttttcatttgtttgagagatgttttaatatcctcttgataccaatcctttgtagataatatacatctcaattcctccccaccaaatctgttatctgtattagcctcataacaaaaataaacttttatgatagagctaaattagttatattgccagatttatacatcttttcctgtactgaagtcgtaaaggtaatcttctattagctccttaattcatcttgagtttgctattatgtatgttgtggaggcaggaatctaacttatatgtatattacttatatatgtgtgtatgtgtattatacatgcacatgatttatacatgtgtgtatatatagttatgtatagtcatacatacatatatttatgttgttaactgaatttctcattatcatgtattggataccgcactagttcctcatcgatgagtaatgtcatctcttatcacataacaagtttatatatgctggatatttctggactttcttctgttagtccactttagcttctccatgcctgcactgataccacattttttatttgctgcagttttataaatcttgatatccagttgggtgaatcgttctttgtttttaaaaatgtagtattctgccttattactcttgtcatgtaaactttaatgtcagcttctaattcagataaaagcttcatgggcttttgattagaattacattaaatttatagattaaggagaagtcagaccttcataatatttagtcttggttgaaaggatggactctggaaccagaccttctatattcaaatcccagacctgccacttagcaacaccatgatcctaggtaaattctctgcctcagttttcttgtcagtacaatacagatagtgataaactgtaaaatgtgaggattaaatgagttgatatatgtaaaagcactcagaacctggcacatagtaagcaaattattaggtattcttactaattttatatctctctattcatttaggctttattttatatccttcaataaggttttgtcaaattcttcacaggggtcttacatatcatttaaaaaagttattcctagatatgttacagtttttgttgctattataagtgagaatttctttaattatattactaaattacatttaagtgaaaagtatccagcagtcttcctgaaatattttattatatcatcgccggtttaagattctatacactgtcatattgttcgcaaataatgacagtttgtttatcctttccagtccttacagcgttttttcttttgttgtattgtgtaagaactctaatacatctttgaatggaaacaatgatagtggtcttctttttcttgtcttgactttaaagggaattcttctaaaatttcacagttaagtgtgttgtttacacagttaagtgtaccctttatcaagttaagggatttaccttctattctaatttgtggagagttatcctgaatctgtattactactgcagtttttaaaaatcacttttttctaaagtcatatcaagtccatactcctgaacagtttgttattaaatataacttcacaaatattcttgtcatatagaaaaaggaaagaaatacttagtggttaagcatcctaatccaaaaatccaaattgtgaagtgctgcagtgagcatttcctttgagcaccatgtgggtgctccaaaagtttcctgttttggagcattttgggttttggatttttgtattaggtatagggattaggaatactcaaggtgtagtggcttcttctattttcatattagaaacagaagcacaaggaatgtcatgtcagaaaccatccacctcactggacatcaagacatagacatgacctcagtatttagtgagatactggcaatatggaaatgtagtgtaaaacggagaggagtgggagatataatttcctattttcatcctctaaatattaaaaatttttatttaggcctatattgatggaagggagctaattatatagaaactgattatatagaaaaggaggaaacaatcaaatttagaaatccagtaattttatgtagcttggctatttctctaaagctaggaagtacttgccacctggttatggaaatgatcactcatctttgcaatatctttagaaaactagcaaaagtacaggtacttcttcagatggttttcatactgtgaattggacatggtaagatttgttacttaaagaatatttttttttttttctatttttttgagacagtctggctctgtctcccaggctggagggcagtggcacgatatcgctcactgcaacctccgcctcccaggctcaagccatcctccctcctcagcttcccaagtcactgggactacaggcgtatgccctcatgcctggctaatttttgtattttttgtagagacggggtttcaccatgttccctaggctggtctcaaactcctgagcttaagcagtctgcccaccttggcctcccagtgtgccgggattacaggcctgagccacggtgcctggcctgagaatatttttttaccttaagtttactactttcagaatcatgatagagactcagcttagttatattgttaaaaagaaagaaaagagggagaaaattaagatagattaatttgggactgtgagcacagcttcttgttttatttgggttttttttggggggtgggggttgtttttgtttttgttttgagacggagtctcactctcgcccaggctggagtgctgtagcatgatctcagctcactgcaacctctgcctcctgggttcgagcgattctcctgccttagcctcccgagtagctgggattacaggcacgcgtcacccatgcctggctaatttctttttgtatttttagtagagacggggtttcactgtgttggccagagtggtctcaatcttctgacctagtgatccatctgcctcggcctcctgaagtgctgggattgcaggcgtgagccaccgtgcccggcagcgaacacaacttgagttttctgttctttgtttatcataagactggatgatagcagtaaacatttttactatggtagtaagaaaagcatgaaggcattgtatttaagtaaaactagatgtgatcaaagagtaagttttataactgcatgtatttaaagctaattgccatagtacttttattatttatctgttgggggtgatatttgttccgaaatattttattgatggagaacataactgaaaaatgtttggaaatactccatctagcttctaacacacacacaccccttattgaaacagtttacttttataatataatttttgatttctcaatattaggatgtcaataactatagaattattacagaaaatggtacaacattgtcagtacttgtttttaaaacatatgtgtttgatttgtcataaactagctttatgagacatttgcaaagtctttattcataagtgagttgttttttccacttccactagtattcataaaagttaaaatgaagtctagcttaaaaaacacacacacacacacacaatatattccccacattgtttccattccatgtggttcaatctgtagttactgctttgtgaccagttgatggtctccatatagtggaaaagcaaaagctctatcctctttatgatcctagtgttggagaaaaaataatgtttagccacagttaggtacttggaaaggctgaaaaatactactaacttatgacagaagtaactttggggaagagttgggcctactgtttaaaccaggggtccccagcccccaggccacgagcaagcattaccacctgagccctgcctcctgccaccatcagtggctgcattaggagcatgaacccgcttgtgaactgcacatgtgagggatctaggttgcgggctccttatgagaatcttatctaatgcctgaggacctgaggtggagcagttttatcctgagacttcccctgccccagtcagtagacaaatttcttccacgaaaccagtccctggtgccaaaaaggttggggaccctgatatttattaaaacaaatcagatgttctttccctttactggtatactatgtttatataaatttattatattgtattaatgtctcgattaatataaaagattaaatgcaggtgtaattttctctttgttgaaatattttttgagaataaattttcacaatgtgtattgtgtcaattttcataattcatgcaacatacaatttgatatatgacttgtatttccagttttactaagcagatctagacatctgttgaataaagtccagtgtattacaaaaaattgaactgacccagggccgggcacagtggctcacgcctgtaagcccacagcactttgggaagccgaggcaggcggatcacaaggtcaggacttcgagaccagcctggccagtatggtgaaaccccatcgctactaaaaatacaaaaattagctgggcgtggtggtgcgcgcctgtagtcccagctactcgggagcctgaggcaaaagaatcacttgaacccggaaggcggaggttgcggtgagctgagattatgccactgcactccagccagggcaacagagcgagactctgtctcgaaaaaaaaagaaaaaaagaaaagaaaaattgaactgaccccaatttgttattaaagggtgaatatatttatatgtctagctttttaaatgagaatgatttgacataaccctgagcttttaagtggtagccatagtatgattatttctattaatattattaataaaaacataactaattaggtttcttgttttattttagcgaagaatagccagaattcagcaaatcgaaaaggacatacttcgtatacgacagcttttacagtcccaagcaacagaagcagaggttagtaaattgcctttcttgtttgtgggtataaaaataggtagttattctgagaaaagaaaacatgtataatttaatgtgacaccattgaaatatagatgttctttcagagaatttaaataccgtaatttttttcgtgaaattaaattatcaaagatttggactattttgattttatctaacttttaggcagttaaaatttataaaactgtaaatatagataccttactttagctgtcagtttacatataatcaaatagttaacttaatttggctactatccagtaagtaaacttttttatagataatccatagtaagaattgataatacacatttacctgtgtttactccagaaaccccattaaagtgatagtaaaaggatacaatgaaagaggcattaagaccagggaaggtgaccacagtaaaatccgtggagctggaaagcaggtaaacaagtgataacattctagcatatcagagagggttgacccataaggcagcaataggaatgaaaagtcatgaagcaactagatacctctgggtgtgagagtaaaaaagggttaaaagcaggaagatatttgaaaatctgttaagaagcagatggactttccagaacctccctacaaccctgtacagctaggtgactgctcctttccaatcccagcaaaagatgagagctttctcctctgaagaggtggagagggtaaacaaagggtctttggttaggggtcaaccttgtttaattgaacgtgagggtatcatacgaaacactgaattacatgaaaatttacctactgaatgctgaaacccccactggcatccaggcttataatctccaggcaagtttctggaaggaacttctataaggaatgtgactaaccctgattctgctgagagaacattaaaaagggagaaaaaaaatcagaagaatgtgactaacccaagaaaaaaaacttaaagagacttacatggaaaaattcacccaacaaaacaacccacctagatcaccctatagggtaatatagttgacaaaatccattcttcaggcatagagcttcatttaactttttcatagatagcccgctcttaaatatgagtggacactaactaccagacagtatagatcattctaggaaggttcaatatccaaataaaaggagttccaaaaagaaaatggagaaactggagacaggaaattagagaaataaatcaaaatttctcagaaattttaacaaggggcttagttttccaaaaaattggtctctccagtatctaacatcatgtataagaataatcctacactaagacacatcatgaggaaatttcaaatcactggggataaaaagaatattctaacaaccttctggagaaggaagagaaaacaaatttcacataaaggaacaggaatgcaaatgcctttacatttgtaaataacagcactggaaactgggaagtagggtaggcatttcttaaaacttttctttttttaagagacgtggaactaagtctcttaaaaaaaaaaaaaaggtaggatgatctagctgggttgttttgttggtgaatcctgccatgtaagtaagtctctttaaaaagtttctgtcacccaggctggagtgcagtggcgcaatctcggctcactgcaacctctgcttcctgggttcaagtgatcttcccacctcagcccccgagtagctcatgtgccaccatgcctgactaatttttgtattttttgtagagacgaggttttgccatgttgcccaggctggtctcgaactcctgagctcaagcaatctgcctgtcttggccttccaaagtgtgggattacaggcgtgagccactgcgcctgacccctgttaaaccttttaaaagaaaatatgtgcagctatgttttgaccccagttctttgacaccactgtatatcctccagttgggttcaattttgatcctaactacccagagttagagtcagctccacaagtaaaagacaaagtcagtcacaagactgtccacttcaaacgccagccacaagttttgggtgtccctaagccaccaggactgctgccaagctgtctataaattccaccccgtgtgcgtgtgctgtggtaccattccattctcacactaactacccagagttagcacagccccaacaggttaagagccgactccttcacaagactgctcccacctcagatgccagccacaaatgttgagtatctccaagccactcacatttctgcccagtgtgttacaaattccaggcttccacatccccttcacgttcagtaattcattagaatggctcacaactcactgaaagtgctatacttaggattaacagttttattataaggatacagatcaagaatggccaaatgaagagacatatggggcaaggcctaaggaaggggtgtaggaatggggatgggggtgcagagatttcatgctttctcctagtggaatctaggcatgtcactcttctagcacttcattgttttgtttttgtttttgtttgagacagagtctcgctctgtagcccaggctggagtgcagtggcgtgatcttggcacactgcaacctccgcctcctgggttcaagcgattctcctgcctcagcctccctagtagctgggattgtaggtgtctgccaccatgcctggctaatattttgtatttttagtagagatggggtttcaccatattggccaggctgggcttgaactcctgacctcatgatctgcccgcctcggcctcccaaagtgttaggattacaggcataagccaccgttcccagccttttccagcacttcagtgtattcaccaatcagaaagctgcactgagttttggtatccataatttttattgaaattttattctgtaggcatgattaattaaataattggccacatgaggattaaactcgatttccagcctccttctcttcctggaggtccgtctggcccaaagttctaactctcttatcacatggtgacagccacccatctttttgctatctggtggcctaccctgagttgcctcattagcataacacacacccctatcactcgagaaattccaagggtatttgaagctctctcaggtacaaatgaacaaagaccagctatattttttattataccattctagcctttaatcaaagtgttaaatttgagagtggaataaagacacttttagataggcaaagtgtcaaatacgtttttctcatgcacccttttctggaacctattaaaggatatactcaagtgaaatcgaaatgtaaagcaagaaaaatgaattttttcaactcaagacccaggggatataatacaagagaaagagatgagtgaaactacagagtaaagatgaagggacatcctgagataaatggtaaagaaagcaaccagtccatattgaaactattgagaggattccaggagagattaagtccaagaagatgaaatcagcagaatacctgcggtttctgaatgtattgaagggaaaggaaatttacacagtaggagagaagctgagcatcagtcatatgtacccagaaacccaaatgaacaaaaaataaagataacctttaactccatggacaacaggaagttgtaaaggaaggtgattatagtataccatctgccagctatgattagaatttcatagtcaaagtaatgtaaatagtggaaaatttgtgtaacaataaagtggaactgaaatgaagcattcaactgaaaaatgcagaactagccattgaagcaggttatttggagatcggagggggtgagtatccccccttccccaaaaactcagctgaaagagattagaaagaaagagttctttcaaaaaacattttcatccatgtctggcttttttaatatctgaggaactttggatttagtacatctgaatctgaaatatgtagaaacttatttgctaagtagacagtttaagtacaatgtgatagtcataatcctaaaagcagtttaacatgactgtcttaagcaaatataagtcaaatatttgcaatttaaagaatgtgttcatttttgcaatggactctttttttacctggcccttggaaagggccaggaaaaaaagcagtatttttttgctccttttcagttctgttggtattgatgtatgtagcattctacttattatgacctttttggctttctactgaagtttttatgtgtctttcatccttaagcaaatttgttttggtctattttttaaattatttttaaataggcagtgttttgtttttaattgaatagctttagttacagttagttctttcccccccatctttcttgtattctgattattactgttttgctgcatctaacaggttttgatatttctaaatcaatagtcacatttttttctagttgattgaatcttttatttatgtaatataaaatagccctctattttatttaatgctgttcaccttcaatttcattgtagtaccatttattaatagtaatcctcattttccagtactgttacaagtttcaggttggaaacttgtttgtgtttcttgtatctgttcaaaactttttattcatattattggatttagggcagactgtctgctactatgatccaacctcttattgcttccttttgttatgataatagttacatcagttgcattattctgatagtttgtaaatgtaagccaaaggaaggtgccatttcacatttaagaaagaacaaaaccactttttacaattttgccgtttgtggtttgtttattgcattattttattcttctaatgtaagttagagggagaagctagaagatggagaaaattggggattggacacttgcaaattagttcatagagcagtagatatgagaaagggaaaagcttctgccaaataatttctctatcatgaagcatatttcttatagcattttctttggctacctgtattataactctggtttaaggtctagatgctggacgtgatttaagtctactaattattacacatgattcaaaactcagaagttacataaaggtatgtgaggcaaccagtgctgtgactttcttgtgtgttcttccagacatagtttatttattaacaagcaagtacattgggtggaatgggagctgtgaggacaatgcagtgtgtcttaaaagataatagcaaatgaagaatacttactaaagtcacagtattcttgcaactcattaataaagataaatacaactcaccttttaagtgggcaaaagatttaaataggcatttcaccacagaaggtatatataggaatggcaaataagtacatgaaaatatgctcaatcattaaggaaatgcaaatcaaagcccaagtgagatactgcttcacacccattatgatggctttaatcataaaggcaataataagcattgacgaagatgtggagaagcaggatccctcattgctggtgggaatttaaatagtacagccaccattttaaaacagttgagtgattcctcaaaatattaaacatatagttatgtgactcagcaatcttactcctaggtatctggccaagagaaatgaaaatatatgtgtacacaaagacttagacttgtatgttcattcactagcagcattttttcataatagcctcaaaggagaagcagtgcaaatgtgtatcaactagtgaataaataaacaaaatttgttatatcccttcagtggaatattattcagcaattaaaagtaagttactgatgcagaatttataacatggatgaacctccagaacatgctaagtaaaataagccagagatataagtccatttatatcaaatgtccagaaaaggcaaaatttctaaagacaaaaagtacattagtggttgtctgactgtaagtggaaatgaggattaactgtaaatggacagcaggaattttattggaatgatgaaaatgttctaaaactggattacagctgtgcttgataaatctaaaagtcatttaattgaacacttaaaatggatggattttgtgatatttaaatacctcaccaaaattttttttcaagttctatcacctagagtagaaaaccttggagaagttgtaaagcaactatggaaatgaggaaactagttagaattaatctttcataatagtgaacaaccacttcttttgtcttcagtgtatcgaagcgtgcaggcaggcctgtagcctaggatcagtgaaagaataaaaaaaagtaattaggaaagaggagggaggaaagaaaatgaagatagtaaatgttaaatggtagtttgggttggaattgcctgggttggaattccagctctgactctgccatttactagatatgtgactgaaaacaagttacttatattctctgtgcctccatctctttatctataaaatggggataatggccgggcactgtggctcatgcctgtaatcccagcactttgggaaactgaggtgggcagatcacctgaggtcaggagttcaagaccaacctaaccaacatggtgaaaccctgtctctactaaaaatacaaaacataaccagcatggtggtgggcgcctgtaatcccagctacttgggaggctgaggcatgagaatcgtttgagccgagattgcgccattgcactccagcctgggtgacagggcgagactctgtctcaaaaaaaaaaaaaaaaaaaaaggcactttaatattactcaacatattcaaaacataattaatgatctgttcctcctaagccctctttactaccccaccttgcagcaaaaaaccttcatcctccctcagtattacctatctctgtgaggagtagcaccatcattattgaattgtgtgagctaaggaatgtaggagtaatactccacaccagacctcttcctccactccccatatcctgtcagcgaacccgatcagatttacctctatgtctccacttcttttatctctgtcactgcttccctagtgcatagtgccactgtctcacacttatattaatacattagcctcctaactggtctttcctatgtttcctccctacttagaccatttaaaatttgacttaaaaaataaaatttacttgcaactttatccattaatatattagtattaattatgtgggggcaatcatgcagtggcctcactgtaacttgcaagtagaaaaggcaagaatgccatctaagaatcgcagaaaaaggcattaaaatttaaatttttttatcatattctttttgttctactttcctccttatttttggtgcttcatccacaccatgattcgttgacacgctaaaacaagccacactccctcctaccctgggtcctctgcatgtgatctgttttacccagaacactcatcctctactcctcccctttgcctagttaactcctatttactcttcaagtctttactcaaacagcacttcccaagagagctcttccaaacctccagagtatatcatatctctctgttatatatatttacagcaccttgtacccttctttcatggcatttgtcaattttacctttattatttctgtcattatttgacagtgtccctgactaaactgtaaggtccaagagagcatagaacaatgtctagttttgctagcactgtattccccagcatctattgcaagtaactaacatagtagatggtcagtaattttctttaaatatgttgacatcttcacttacgttagtgtcaaatctttgtggtcttagattcattttgtctctaggttgactttatgtatgtatatctattcttgtggattccattaaattctatagcatgattttcagatggtactaattattcttatatttctggattactgagtgctacctcacttttgccagcatataactgatactagtttattgatggaaatgttgcatataaattaaatttttaagtcacattttttaaatgatctaggaaagcttgatgtttaaagaaattacgttaggaatcattttgtaatttaattatccactgttaggtcagatttttaatgtataatttttattttagatatttttttcctagaacaagcatataggtgtttctataaatgaccgtgagaaattcttttatttctttaattttgtggtggtatttttataaagtgactgctttgtgctagggataatctatcttgaaatgactgcttttactggatgtaatctgtcattttaatttcctgttaacagatggtggttgcattagaaaaggctttgggttttattcatatcagaagctaagagcctatcattttatttcacctaacttttattagaagatatacatatatatatatatattctatgtgaaaatatacctaagtagaagatatttgtaagcttaggtaatagtttaactgttgtatttgcagctccattaaatgtcagaatcatgtgtccttgcagaaaagatagttatttgttctacttgggttatgttcctgatagtaatgtgagcgcagctggtagaggatggcattcctgtgagtctcagaaaatcctttgtctcgtgcagctctaatgctcaagggacacacttcactttccccttaccgagatagtcgaccgccaatcgtactggaggttatgaagtgtaatacacagttccatgcctttatcagtctgtataattgatgcattcagagctttaaagcaaaaaaagaaaaaaagccttgggctaagaaagcctacaccatttttgcatgtactgatgttaactccatcttaacagaggtcatctcagaacaagcatgaaaccggctcacatgatgctgagcggcagaatgaaggtcaaggagtgggagaaatcaacatggcaacttctggtaatggtcaggtaaataaattattttatcatattttttaaaattatttaaatatcagaaaagtatgaagcaagatggttctaagaatgatctataaatcttacctattttcttagtcctgaatgcatatttccagaagcattcagtaccaatgtgctgtcatttctctttattatatcagcaataatgctgtaaggattttctagatctatttctatagctatagattgtgtgtttatgttttagtctaaaatgattgtgagtagttttttttaataactctaagctgcattttgattatgtatatgatttgacctagttatttttgcttgccttgaataggtttgctctttcactaagaccttcaatgtaaagacatttttatggttttttttaaagttataaaggctttatttcctgttgtacttaaagattatataaatctagaaatccaagtcttactgaaaaagataattgtaatgcacacaaaaaagtaaggcaacatggcctaattatgcttaatattaccacatcattttcagcaaaattatgaaagtaaactttttttttttacatacagaactgttatttgttatgctaccatccgttatcttattagatttttattgaaatacagtgcaataggacagaatttttctttagggtgttctgtattctccaaattttcttcaatgaatatttttagagtgtaaatgaatgactttttaaaaacagaatttcactaaattgttcttaaaggtaatttttctactgttgatacagaaaattttcttagtctctctaggttacttttgatagtattgtttttaagaatatgcttctattagttcattaaaatgtaaagcttaaaatgtcttattaagtatttaaatttattttactgagttaaaacaaacatacttcattcagtattactagttagcattatattggaaaacaagtggtaaattaggacaaaggcaatcatgtttaaacagcacatttgagttatgtatctgtcttttgtttagggaattagttgcaacatttatatattcctacacatatgtagaaggaagaaaaatttaatcctatatgacagaaaaaaatatttacataggaatagatctactcgtagtgctttgggtcatcttccaattattatgtactttggaaaccttacctatccagtaagctggctatgataaattggatccatattacacttactacatcaaaataaattctaagtagattagatttaatgtcaaaatgaaaatcattaaaaatataaaaagattagaagaaaatgtgggtagcgtttttataatcatgatgtaggtgggagacccataaagaaaggattgatagatttcacgttacagcatgagacttcagtatgccaggaaatcatagcgagattccaaaacaaacaaccaagatcacattatttgcaaacatttatgacgtgtaaaaagttaaaattcaagatgcaaaaaacagtatttatataccagctatttaaagagtatcttaaaatggttccaagccatcgtagaagtaaaaaaataaataataattttaaaaataaaattaaaatgggcaaaggatatgaacaggaaataaaagaagaaattaaaatgacttgtaaacatggaaagatggtcaactttactaatcatgatatataaatacaaattaaaactaaagtcagatttcgtgggggggccatttagttggcaaaaatcaataacactcagtaatggtgagcaaacaggcattctcatatgttgcttttaattgtatgacatgaaacaggctttctggagagcaattttgtcaaatgcatctagcattatttataatgtgcctgttgtgaagctcatcactacaacatctaagattttttgctaatgagataatcagtcaagagtgatcagacatgtttgaagagattcatcataatactaacaatagcaaaaagttagaaataacctaaatggacattgatcgtaaaatggttaaattattagtcagctgtagattagttaagtggctctggagtcaacaaacctgggaaatcacactccctcactaactagcttagtaacaaaaagtctctgagctttagtgtttcctctttagtaaaataagatgatgataaaacctctacctcatagaacagttgggagagttaaatgcaagatacccttaacacagtccctggcatattgtcagagcttagtaaaaggtaaccgattctgttgttaacaagtgttaataattatctttaaattaacaaatatgccagatactgtgttggactctagaattgataattgaaaaggacagacagtccttggcctcatggaacctatatggtgcatccatgcaaatattaaaaatgataaattacatctctatttatgtaaagatctaatttttagccttcaattgttgccttttctagtatatccttcatattataatcagttattcttctaaaacatgaatctgattatatcacttatttgtttaaacctttcagtggctactcacctcccatatattagaatccagattcttcatgttgcttactcttccaagagtatctcacaatatttgcccacatttctcaccactccctcaacttcaacttcttcagttccttgagtatgtccaggccttccacaggacattcctttggtctaaaactgtcttctgcttcagttcatattatatgttttactcatccttccccaccgtttaaatgtcacttcttcctggacattttccttgtctccacctacctggaataaataaagtactctttgatacgctgtattcctgctctcatagtgcttagcacaatttatcattggtttaattgtcttccttccttcttaaagtcctttaagccacacctgctcctcactgtatgccagccaactaatatgtacctggcagagagcatttatgttgaatattaataaatattattgacttaggtaattataactttttttttggagacagagtctcgctctgtcagcaggctggagtgcaatggtgggatctcagctcactataacctccacctcctaggttcaagcaattctgcctcagcctcccgagtagctgggactacaggtgtgtgccaccacaccaagctaatttttgtatttttagtagatacagggtctcattgtgttggccaggatagtctcaatctcttgacctcgtgatcctcccgcctcggcctcccaaattgctgggataacaggcgtgagccactgcgcccggccaattacaacttttttaatttaaaaatagcaagtatgctgggcatggtggctcacacctataatcccaacacttagggaggccaagcgggaaggattgcttcagggtagaagttcgagttcaacctgggcaacatagggagactttgcctctgcaaaaaaaaataaaaattagccgtgtgtggtagtcccagctacttgggaggccgtgtgggaggatcacttgagcctgggaggtcaaggctgcagtgggctatgatcatgccactgcattccagcctgggtaacaaggcaaaaaatattttttttaatttttattttttgtctaaaaaataaaaaaaaaaacttaaaagcaagtaagtatgatctcattatacatatgtataatgtgtgtatatgcatagagaaatgtgtgggagaatgttctttaaactgttatcaatagttatctctgagtgttgggatttttgtgggttttacttattcttttgtgtgtcgttttattttttgtaatgaacatgtattactataatttataacacccaaaacccattttcattttgggaaaatagaagaaagcactgtcttgatttccgttgtatggtagtttaggttgccatacttcagagtcctaccatgacatacatcatgtcatttatgtcagtatagggatggcagaggaaaagatctattgaaaatagtaaatcagggcccggtattcattcctcctttaagtgatgaactctgatagtgctgtgaattcagaggtaaacataagtatgtttgtttagcagtagcaatcatagacttgcccaccatattggtgtttgtatgacactaatgctgctaatactatctggttactttcagtcactgttttaaaacaatattgcagctattcccagatcctgatgtagatgtgtgacctgtatctgtgggactgtgatttgttattccaaaagtcctttcatctaaataggatctatacacatgatcgcctcttggggtttattagtttgttttgttttattatttgctcaaaagacaaaagccaccaacactagttgaaaatgaaaatcagtctctgactttctcaggatcacagtagcatgctctgccaaagttctgtcctagagtaattctcttcaccaccacgtgggaatgtattctaccgcttctctcacctggtttcctgcccacaatcattctctttgaaaaatccttcattggcttcccttgattcttagaaaaatgataaccatttattgtgacccaggtaacctggcccctacctatcttgtcagctttatgtcacatcttgctctcacacctccacactggccttctctcagtacctcatatttactgggccttctcctaccacagcctgtgcacatctatacctgttccatgtagtgtttgtttcatcccattttgctcagttaacaccagttcatgtgtgtctgagcttaagcaccagtttctcagagaggctcgaacagatcaaatctcactaccataggctgtcacagcatgttcctctcgtttgaagactactacatttgcagttttacattaatttgtgtgatgacttgattaatatttgtgtttcccccactagactgtaagctccagaaaggcagggattctatctagttttgttattttcatacccacacagtccctgataaatagtagataacaataaatatgtggtgtgtgtaatatccctgctaaagaaagggtttcttgatctgtttttaatctctcatggaagttaaatggaaggaaaagcttaggagtaaattatacaggccagatccctgcttgcttagcatataactatgtgtataatttatttattagttggttctcaactttatttatttatttatttatttatttatttatttatttattgagatagggtctcactctgtcactgtacaccactgcacagtggtgcaatctcggctcattgcaacctctgcctcccaggctcaagccattcttccactgtcattcttggatagttgggaccacaggtgcacaccactgtgcctggctaattttttaatttttttatagagataggatctcactatattgtccaggctggttttgaattcccaagctcaagcaatcctccagcattggcctcccaaagtgctacgattggctgggcatggtgctcacacatgtaatcccagcactttgggaggctgagatgagtggatcacttgaggtcaggagttcgagaccagcctggccaacatggtgaaaccccatctctactaaaaatacaaaaattagccaggcatggtggcgtgcatctgtaatcccagctacttgggaggctgaggcaggaaaatctcttgaacctaggaggctgaggttgcagtgagttgagattgtaccactgcactctagcctgggtgacagagcaagactctatctcaaggaaaaaaaaaaaaaaaacgtaaaaccaaagtgctggaactacaggcgtgcaccaccatgcccagcctgtggaaagtgttgaccaaatatcttctgtatatcagagtgtttctatggcaattacagtttgacagtttactgtggtaattgtattttagggagttctgggtttttgtaatttgttatttggggaatttaagaaattagtttttccagtaccctttattctttttatacgttacattgttacttgtgaatcagccatatataatttttatataaacaatatttttatactatacaacttactcttgtcatttaataatactttgagatatcttttcctatctatatgtggtttatagatatggaagtttttaatccatttttctttcactattttttctttttttcaagcaacctaagcttttctatttgaaatttagaaccaggtctctggtaatagccagtatataataataaagctcaattaaaagtgggaaaaagatggaatgatagaaaaacccactctactgccactggtttttaaaactttttcttatggaaaattttaaacatttacaaagacaataatgtagtgattcatatcgacatgtaacctattcaccttaacctcccattttattttttaagaagattccaggcatcatcatcacttcttccctgtttcactgtgtatttacaaaagataaaagtacttattaaaaatacataactggccaggtgtggtggctcacacctgtaatctcagcatttccagaggccggggtgagcggatcacttgaggtcaggagttcaagaccagcctggccaacatggtgaaaccctgtctctactgaaaatacaaaaattagccagatgtggtggcgcacacgtgtagtcccagctactcgggaagctgaggcaggagaatcacttgaatccaggaggcagaggttgcagggagccgagatcgcaccactgcactccaccctgggcaagagagcgagactctgcctcaaaaaaataaaaaaattaaaaaataaataactgcagtggcattattacatctccaaagactctaacagtaattgtttaatagcatcatttatccagtcagtattcaaacttgcagttgtttcataaatgtctttttcacagtttatttgcctcagggtccagataaggtccatgaataggaattagtatatctctgatatctgttctaatctgtatgttccttctttttgttttacggccatttagttattgaagaactaaagttgtttttcttttttctttatggttttctggggttttgtttttgtttttgtttttttagtcaggatctcactctcgcctggactagagtgcagtggcaaagctcactgcagccttgaactcctgggcttaagcgatcctctcgagtagctggtgctataggcactcaccaccatgccctaggcctccctctgttccccaggctggtcttgaactcaaactgatctcaagcagtcctcctgcctcagcctcctgagttgctgggattacaggtttgagccatcatgcctggcttccaaatgttttttttatagagtgtcccatactctagattttgctgatgactccccatgatatacttcaacatgtttctttatcatctgtatgtcctataaattggtagatttcagtatctgagaatattcaagaagtagaatcagtcaagcttagggattggatatgagtgtttagggggaaggagaagtcgagaattactcgcaggtttctgttaggcagctagaagggtagtgatgcaatttagtaataatgctagatgagaaggaggtttgtgagagaaaataatgagtctagttttggaaaaatgttaagtttaactttaaagatgttaggtctgagacatcaaagcagaaatgcacctgggtgcagtagctcatgcctgtaatcccagcactttgggaagcaaaggcaggtggatcacttgaacccaagagtttgagaccagtctcagcaacataaggagaccctgtctctacaaaaaatacaaaaaaaaaaaaaaattaggcgtggtggcatgtgcctgaggtcccagctacttgggaggttgaggtggctgaccctggaaggtcaagactgcagtaagctgaaatcatggcactgtactccagcctaggcaacagagtgagaccctgtctcaaaaaaataaaataaacacacaaagtagaaatgtgaggtaggctattagatttggaattgagaggaaaggtaaagaattggtaattaaaggtattaaagatttttacatccccaatgagtatacagtgagaagatgaatacctagcctaaaattccaaagcagtagaataatattgttacaacaaagagggaacagttaacagtttccaccattgccatgaggactaaaaaatcaccttgggtttcaccaaaaaaaaaaaaaaaaaagttcattgctgatcttgtcaaatgcaattccttgggccttctttcctactatattatattggagtgagttgaagttaaatggaaggttaaaaagtagaagagagcagtcaggcgtgatggctcacgcctgtaatccagcactttgggaggccgagatgggcggatcacgaggtcaggagcttaagaccatcctggccttggtgaaaccctgtctctactaaaaatacaaaaattagctgggcgtggcagcgcgtgcctgtaatcccagctactcgggaggctgaggcaggagaatcgcttgaacccaggagggagaggttgcagtgagctgagatccttccactgcactccagcctggtgacagagcaagactccgtctcaaaaaaaaaagtagaagagagcaattttagctaactgtaaagatgtctagatgtgaactgcccaagagagaaaagatcgttaactgatacagactataagtttgagagaaaatttatttctgtttttaagatagaaaagatgaggatgtttgaatgctgatgggaaggagccagtagagaagagagttgaagatccctaagatcaaagagaaatggagagagaaaggatccagagcacatctaaagggatggaccttagataggaggaggggaactctgatgtcacagcaaaaggtggcgatggatatatacgcaggtaattttaaggttctggttagcaagaagttgaggaaattttgtctgttggctattttttctataaagtagaaggtaaagttatatgcagtaagagaagaagagccacagttttatatgatacaaaatgaggcatatcaaaaatagccaaagaaaggagagctgacaagggaaacaaaaagatggcagttatagcacggagagtctaggtgtattggtgaccataaatgtatatcgacagcatcctaaagagttacgtaagtttctcacatgctcaaatttctctaatgctgcctggcacttcatgtcagggtgtagagaaaacagacagttggattcatctgtgattgcaatgtttccagacaaatggggtggaataagtgcagggcaaagctgttaaaagctagcaagagaattatgaaagtgataaccacaagaaatccaacctgaaatacatgctggatttgctagtcatttcaaggaagcagtatcttacttgcggtcaggagtttgagaccagcctggccaacatggtgaaaccctgtctctactaaaaatacaaaacttagccaggagtggtggcacatgcctgtaatcccagctactctggaggctgaagcaggagaatcacttgaacctgggagccagagttggtagtgagctgagatcacgccactgcactccagcctgggcaacacagcaaaactccatctcacacacacacacacaaaaaaagaaccaacatcttagagaaagttgaagaccaggaaataaaaggagcatgaagtaaaatgttgaggatgtatggatatttataaagcattgaatgtggatggtacaggaaagttggataggaaaaaggacagtgggaaatagtgtctcacacatttggacactgagtgtcaggaatgatacagcgagtgcttctatctttggacaatgagcaaagctgattcaagggatgtgcaatcatgactgacttagcaggtcttgaggttgtgagaaagttcatcacactcaagtttattcagaatttagttttgagttgggtgggaaacaattcttaggaagttattaatcatttcttgtggatagggagactctagtccctccgaaagaagttggctcaggtctagccttaataaaacgcccaagaaagactctcatggaccaagttctaggctcatagagaatacgagtatgtgtacctcttggtatctcctaataataaatacatctaaatttctactgagacagattggtgaatgaagagtgtctcaaaatccaggagctatataggaagataactaagactgaagcttagaaaagatttgttgtctacactgaaatgaatgtcagaaacatgttttattgtggaaacaggttttcccttgtttcataattaaacctcctgttttcttttgtttcaagtagtacattagttagctattgctgcataacaaattgcccccaaaacttaacagcattagtagacatttatatttgcttctatggatcagaaatcctggtgcagctgagctgcctgtctctggttcagggtctcccacaagacttaagggtattggctggggttgcagtcatctccacacataaccaggggaggatctgcttctaagttcacttacggctattgaaggcctcagatcctcattggatgtcagccagagagacatcagttccttgttacatgggcctcaccaagggcagttcacagcatagtaacgcttccctcagagggaacaagagaggtgcccaagatggaagacacgtctttgtaaccttatcttgagagtgcttctcatcacctctatagcattttattcactagaagcaagtcactaaatctagccaagactaaaggggaagggattacaaaaacgcgtgaataccaggaggcaaagatctatcttagaggctacctacaaacagtaaaaatatttagacatcttccaagattgtgtgtttgcttcagggtaaagactcatttcccttctatagaccaagaaaaaggttccttgtctgaatttactaaaaaagccccaactatcctccttagcctgagtctcagtccctcagatctatcctttattagttagaaccagagtaagctccttatgttcagatttatttgtagttctgcctccccttcctctccacacacacacaaacacaactataccatattcttctgacccttgcttatgcctctgcctttgcctgggctgccctgtggctaatccccctcattctttttattaactaaattactcctcatggttcaagtccaaattcagatgccactttttcaggaaccaagactgaattgtgtatcttcctgtgtgttcatatagtttctgtcaaagcacttacccacacgtattttcatgttcagctcctcatctagattgtgtgtgtagtgtgggtgagaatgtcttattcatttatattcctggtgactaatatactacctggaaagtagcaggggctcaggcaatatttgttgcttggttgcatgtggatttaaagaccattccagaagcagtcaatagctggtggcagtggaaagagatgtaagatgagtctttccttgatgcctcttttcccttccctaaggaggattactaattagttttgtcctagaagtgtccctagtcagcataaagagtccagacccacaaaggaagtagagactggaaaggggagccactctggactctgaactagtattctcagtccaaccccagacttccctatgcgagtatgaataagtggattatcttgcctttatatggggacacattttttaaaacctctcaagttaggattttttaaagatcacttttattgaagaaagattagtatgtgataaaatgtacccattttaagtgtacagttgaatgagttttgacaaatgtagttttctctttaaaatgctgatctaaaatagctaattattgtgaacgatgatctaaaatagttttgtgcactagtcaggaaaacctcaccttggcttataacatgacttatacagaagttctaagcagccctcataaaaattaactttggagtattacctatttaaggactttatgaaacaaatttataacaaatttgaacaaggaatttattacgaattcagaaatctctgtatgagcccttaattattgcttgattaaaatcctgacgaatcacttaggaatacattgttaacagttttctatgttgtctaccaaagtggaagttatctggcaaacagtttacgttgctagctaacagggaagaaaagtttctaatacgtcaccatagctgggctcattggctcgtgcctgtagtcccggctactctggaggctgaggtgagaggatcacttgagccaaagaattcagagccagcctgggcaacatagtgaaaccttgtctctaaaaaaaaaaaaagaaaaaagaaaaaaaaatcaccaaaagtgaaatttatgcacaaaaggaagttataaggtgtgttggttccagaattctccccttgtaccctctagagtaggaggtgccatctcacagtcctcaaaacctattactcccattgtggttttctctttaccttcttcaattagccagagcctgtatatctgaaagacaattcgaatgatgtcctgcatcttgacattcttacggattttactaatagctcctcatttatttataattcaacaaatattctgtggatacctactaagcttaagaccacccttggtactaagaatgcagcagcgaacagaataaagtttctgtcctcaaataacttacattttagctttccattctgcaaggttgagaactgcaaaagaatgcctgcaaatattgctgacactattcttacagtcatttccttaattattaatgaatggatttagctgtggcctatattttgataggtcccagttatttatctgcaaccccacctcctgtccagagttgcatcctttgttttcaggtgcccattggggattcttactggatgtcagattcaaagtgagctcagttcccccaatgaaagccatcatttatttctgggtttccgatatccattacgagcatcattacttacccatttatccaagcttgacacctccaagttgtcctcgactcccagcccctctttactcacatccagtcaagttactcaagccagttaatttgaccttcagttcaagccaattaatttgaatatccttcaagagcatccccacttctctattctcactgccttagtttgtgccctcagaaccactcaactgctgaaaataccctctccctcatttcctacctgtgatctctccgtgctgtttttaagacgtaattctgattgtaccattctcctgcctgaagtccagtgactccacagcttgacagcaacatctttgaaatgacatgagatacttaatgatttaacccaacctttatctctaaccatacaccttgtgttctgtccacattacattggaacactccacgctctccgtatttgtacctttgcacagtctcctccgtcagtctcctgtcacaaaatgcctaccttaaatgttactgattttatacagcctctaatagtccctatgcagtaatttctttcttcctgttttccctcagtgttttgttcattcttctactgcggtgtttatattatactgcactgcagtcatttattttttcatgtctttgtccagtaaaagttttaaacagccctttctaaactgtgagatcttagagaacttggactgtagcaaattcatacttagttttctggcaatttggagcatttcagaatttgaacattccttcaatgcttttcatcaatgaacttatctgaatgtggttttatttatttagatctatgaaaaattactaccctagaatttcttcagtctttggttaagtccattctgcagtttaatgctcatatgcaagaaactctcttttctttagtttttctctaaaacatacttagtaagcgtataggtaaaaaatattttgaacagttataatggtcatacttttatgatgtatttaattgtttatcatacagacacttcatttggagtaccttaacatgatgttatctgtatttacctatagtctaaattataccatctataatgtgcttaatttttagggttcaactacacgaatggaccatgaaacagccagtgttttgagttctagtagcacacactctgcacctcgaaggctgacaagtcatctgggaaccaaggtaacagaagattacaaaccctggtcactaatgccatgactactttgctaagacattcttggccaggtgcagtggctcacacctgtaatcccagcattttgggaggccaaggcaggtggatcacttgaggccaggagttcaagaccagcctgggcaacgtggcaaaaccccatctctactaaaaatacaaaaatttagccagtgtggtggcacacacctgtggtcccagctactcaggaggctgaggcatgagaatagttggaacccaggaggcagaggttgcagtgagctgagattacaccgctttctagtggagaattctgattcacagtctcttgaagaaattacatatttttatacaacgaagcataaacaagggaaaaatcaggtttataaaaagtgccagattagctaatttttaattctttttcagtctttacatccacttttctgcaagaatactgagttccagccaaactggctcacttcctgcttcctgaacattccctgtgactttccccctcccttccttgcctgcattggtggggaccaccataaatgtctgtcagaatcctagccagccttcaaaactcttcttgggctttgctttttcacaaaacattttctgattcccaaggtcctcttacctccccatgtgatccatctgcctcatttgaatcactaacaatttgcatgaacctgtcttttggaaatcaagaaatgtttttttacttatcttttgctgtgtctaacagagtgcctgcacatgagtaaatatgtattgaggtgaatggaaaaattgttgaagttgagtgttatttcatgctgataagtgagctttcttagagtatctttcttagatgttagcaaatattttaggatttgggaataatgtttgaaaagaaaatagttactttaagccggatgtggtggctcacacctgtaatcccagaaatttgggaggctgaggtgggtggatcacttgaggccaggagttcgaaaccagcctgaccaacatggtgaaaccccgtctctactaaaaatacaaaattagccaggcatggtggcacatggctgtaatcccagctactcgggaggctgaggcaggagaattgtttgaacctgggaggcggaggttgcagtgagctgagattgtgccattgcactccagcctgggcaacaagagcaaaactccatttcaaaagaaaaaaaaaagaggaaaatatagttactttattattttaaagtcagagatttgattttatttttattttatttatttatttattttttgagatggagtcttgctctgttgcccaggctgtagtgcagtggcacgatcttggctcactgcaacccccacctccagggtttaagtgattctcctgcctcagcctcccaagtagctgggattacaggtgcgtgccaccatgcccggctaattttttgtatttttagtagagatggggttttgccatgttggccaggctggtctcgaactcctgatctcaggtgatgcgctcatctctgcctcccaaagtgctgggattagaggcatgagtgaccacacccggcccatcagagattttaatattcactaagatgaaatgaaattctaatattactaaacgatgtattttcgattaactcgaattccattaattgttttcacagcatactctgtatactctttctttactgtaaataatataatagctcttgggaaaggtattactgaaataactaatgttgatttaagtaatgattttagaataatcaatgatattctcactatgaggcttaatcctgtttatacttcttgggacctcatatgccattcactgtgccaggagttgtatgtaccttatctctggtcctctccaaaattctatgaagtatccatatttctctaaatgagaaaactgaagcaaaaaaaattttaggcatggaaatttaattccagatctgtctaacctcaacatgtagtttttactataaagaaaatcttgaatattcaagagtaatattgtgtgaaaactggcaattagaatactgtttctttttgaagtaatttatgcatgataatattaagaccctagtatgtattttgaatgctagctactgtcctatacatgtattattttatttcaccttaatggagaaaaccttgttaggtaggtaaatttctccattttgcagctcagaaaactgaggctcagagaaatcaaatagcttaactataatagtatcacagcttgctcctaagaggtggagccaaaatttgaacctagctccgatgaaaacccatttatccgcagtcctatactgccttcctaaaactttcatatctaaaggtgtatgtgtatttacgcatctaaagcagcatttctaaacctcagcactattggctggataattctttgttgcattctagaatgtatagtaacgtccctggtctctccccactagattcccctaaaatacccatcctacaattgtgacaaccaaaaatgtctccaagatgttgtcaaatgtgtcccgatgggggcaaaattgcccccagttgagaaccattgacttatagagaatgatgcattctttatataatagcctctacttttatataataccctctagcgttaaaatgagtggaccatggcccaggataactgggtgccactttccggtttctaatctgcttctaactaaatacgtagaatttattgtcagagagtaattagtacttaccagttgctttttaaaaaactgactacaaatcctggctctcactctgtatgatcatggcattttcctttttatgacaaaatgtttttaaatttataatcgtataattttaataatattatcatctgacgagaattaatgattgctgagaattagtacttaaaattgttgcagaaatgttttctgtttattgcttataggtatagattaaaagaaataagataaagttttaaattatgtaaagatttagataaactacattctctatgtgtgtgaaatccgttgtttttcactgattatagtcagtggattagcaccaacttatctaggcaaacagcactaacagtttgttagtgagtatgcaaaaacctacttttgcttttaatactgtatattaccactcatactatttactcacataaacaaattggtgatgatacatagattttgaaataacactgattacttcatcctggaaaggttttccggttttttgttttttttttggcggggggggttgttttgtttttttagagttatagtaaatatcccattcatcacttaattggtttttggcttttggatattaaagtcgtaattttgtttctaaactcatttggcccacaggtggaaatggtgtattcattgttgtcaatgcttggtactcatgataaggatgatatgtcgcgaactttgctagctatgtctagctcccaagacagctgtatatccatgcgacagtctggatgtcttcctctcctcatccagcttttacatggcaatgacaaagactctgtattgttgggaaattcccggggcagtaaagaggctcgggccagggccagtgcagcactccacaacatcattcactcacagcctgatgacaagagaggcaggcgtgaaatccgagtccttcatcttttggaacagatacgcgcttactgtgaaacctgttgggagtggcaggaagctcatgaaccaggcatggaccaggacaaaaatccaagtatgttctctatagtgtacatcgtagtgcatgtttcaaagcaaatgtgaaatttttaaacagaaaacatgtttagttaatatgctgtctttatgactaagaggagaaaattcatatcagccatttgtgctactcatatttaaaagattaagtctgtatttccctagaaaaatttagcaaaggaaaatgttatgtgcactactataagaacagtaagtcaagagaaatttatacaatcatagcatagtagggccttagtagagctagaaagaacttgagcaattatgttgcccatctttcacttcatagctgaagctcatttcatagatgaaagtgactttacgtaagttcctatagccattagtgtccaaaccataatcttttacatttgcatatcattatattcaggggatacagagcagcgttacatctgttatgttatttgctcctcacatcaacctactgaagtaggaagggaaggtattatcatctccattttacagatgaaaaaactgaggctcagaagagctaaaggacttaaccatggcctcacacctagtaagtggtagacccaggaacagagcccagatctcctgactctcagctcggtgctcttcctactgtaccatccagctgtagacagtgggcctcagttgctgggagtgataatccacccagctcttcactcaggaagggacccttagacctcagccccactcccgcaggagcagcatgggagttaggacctatggggatataacttatttcattcctgtagccaagaaccaaaagcagtaagtatgtaaggtaagaccttcctttcacctgataagaactgacacacacacacacacacacacacacacacacacgtgcactacaagtagatgattctactgtatcagcctattgatgtgaagaggagatgatacaaacatgacttatgaacctatagcagatttttttaagcttaggtatgaaggtgaatttatttgaaatctaaaaatgttcaaggataagaaaggccaggtgtggtggttcatgcctgtaatggcagcactttgggaggctgagacaggaggattgcttaagcccaggagttaaagaccagctgggcagcacagtgagacactatctcatttttaaaaaatttaaaaagcataagaaaaaagggattgcctttcatatctatttgtcctggggtgaggggaactagtaagattttactgggagaacattgccttcctggattgtttctttggctatccacagttacgtaatgacccacattttgtactcctgatatttgttctcaaaaaattaaatagaataaaatgatacttcttttgagaagttttttaaaaacttacgtcaaatgagttttgaaacctcgtgcatagtattgaatgtggaggtacattttcttagtcacccttttaaaaaatatctgtttactgtctagtatatctgtgtaactttttgtattagagatcacatttgtacatagccacatgctttttttctctgtttgtattgagacagggtctcacacaagcgcccagactgtaatgcagtggtgcgatcacagttcactgcagcctcaacctcccaggctcaagcactcctcctacctcagcctcctgagagtatctgggactacaagcatgtgccaccacaactgactaattttttttttttttttttttgagagacggggttttgccatgtttcccaggctggtcttgaactccttgggctcaaggatctgctcacttcagcctcccaaagtgctgggattactggtgtgagccactgcacctagcaccatgtgcttttaacccacactcatgatagtagtttaaatagaaattataaactgggctaagcacggtggctcgtgcctataattctagcactatgggaggcccgggcaggagcggcacttgaggccaggagtttgagactaccctgggcaacatagcaagaccctatctctacaaaaaattttaaaaattagctagggattgtggggtatgcctgtagtcctagctgctccggaagctgaggcaggaaggtcaattgagcccaggaatacaaggctgcggtgaaagctatgatcattccactcgagcctgggcaacagagcaagaccctgttttgttttttttttgttgtttttttaaagaaagaaagaaattataaacaaaattaaaccattttataccaaaatatttttattattttgtatactcaacataattttaagttattagctatatgagtaatagcataaacctcctagacttattctaagagacttagtcaagggcagatgagtggtaaacatttttatggaaacaaatccctttattcctattttttgttccacatttgtagtatttattcatcctttcagcaaatatttgttgatccactaaaattccgtgaattagggttatattagtgatccctgcatatttttaaagtacaataaacatcattgctcttcaaataacaaagcattatggtttatgttgattttatttttcagtgccagctcctgttgaacatcagatctgtcctgctgtgtgtgttctaatgaaactttcatttgatgaagagcatagacatgcaatgaatgaactaggtaagacaaaaatgttttttaatgacatagacaattactggtggatttttaaatcatggtagaaattcagtatagtaaataaagatttttaatcattgatgaattaggatataaggccaccaacttctgttatcagctgcttcctctgtgtagcaaaaaattgtaccctggtttccagcatagaaaggatcctgaatcacagaaactgctaccctgtcataagctaactttttcaaaatcgaagccggagattgaaaaaaaatgacaaaatgggtcactctttgtcccttttgccaaagtagactctatatgtgccagctgatgaggatggtaatttgaattattttgaaatgtggagctgctgtattgtgattgaactcagtcacttttgatgagcatcagagggaattattattaagattgtcatttatcttcatggttattggtactttacaggattttcatcataagcagcctggtatctttgaaattggttaatatagaaaagtattatgctttaagtcagaaacatttcattataactttggaatgattacttctttaggtatgtattttcacacactaagccttatataaccagcagtgcactccattttttatgtaatggtttttctttgatttctaggttcattttgtacatgtggtatttataaattgcatcatgctgaaccatctcatgtgaactggatctctctagtcatgccacaagcaagaaccatacgcttaattcccattttagtgtaattgtgcccttgctttttgtgccgtttatgttacattatgttccagccaccactttatattcctatcccctcatcgtttcattcgtcatttatcttaaaagtgatgaagtcatgagactcttacacagagaacctgaacagccaaaagtattgtctccttcagagtcatcactttgggaggctctgcaccttaagatttcaggcctgccctctggccatgctttccttcctagtggtgtagcaattggcctacctgattctctttcctccccctggtctcctgtggattctcagttaatcttatgaattctcccctcgttaatacaatctcagcatttgtgaacattttaaattttttaaaatgctaatcataacaggaaggggataaaaaataatgaataaacaggaaaacattcagttttaagatacctcaaaagttattctgtaaatgttcctgtattccaatggattgtagactaggactgagacattaatcatctggatttcaaaataaaacctagactcagtatttgttcctcttccttcttcaggtaggaaggctacccggggcatttcatcacaggagctagggcaggggctttcaggtgaggagcaggatggggcctctgggggtgtgactgctggggacatagccacaggggattaccttcttctcactcctcacctccagatttgcactggggcaaaaggaggattagggtgtgtggattgcggggagataatagtacaagacagcacaaggttttggcagtaagggataaggagaaaagaaatcccaaataggtaaaggggaattccttagttcagtcagctgggatggtcatttgtacatatatgaagattctacagctatcagtcatttaagtttgcacttattagtattagaagttttagaatataatttccatgatatatgtttattgattccctaatctaccccagaaactgtgctaggcactagatttttataatgattaagacctggtcctggctttcagggaactcacagtttatttgcattagtgtttcacaaaatacctaaatcataatgatcacccagaggcactcgtcaaactggattttctggcactgtagcaaacagaatctccaggggaagggcctaggaatcaatgtgataagtggcctggctgattcttatgttcgggaaattttgtgaaacaccagtagaatattcttgttgagcctgtgatatttattttagaacaaggcatttcatgctaatggtgactatctaaaccaaataaaacaaaagcaatatgctttttaaaattatcagtctttcttttgttcataagagtctaaattaaggattctgttgaatgtcacctgagtctgttggtgctctactatcggtagttttaccctattgggcaatagtccggtctatttagaccactgttttctaacaggcaccaagaaaattgtagaaggacatgttcatcatctttgcattaccatgaaacatcctgatttttcttagagcaaccagtttttaattgtatcaatccagtcatgaatttgcatattttagcaaatccatttataggtttaacctatgaattctattctgtgcctcaaaattctctgaaatcttttcatttgcctgaaatcaaaaagcacttcctcttttatctgatagtctaaatttttttgaatgttctttttttattagccatgttcttcctgaatctgttgatatctgccacattcttatttaatctttattttcagtatcaaatcctaagatttttagtttttccatacaagagtactcaactctttgatcatgtagtgccttcttggcatcttctttaggtgcattttatctttcttaagaaagtatcccagttattgtcacaccaggcaagattttatacagacaaaaggcatagtttgttttgttttggtattgatcctctgctttaaaatactcgacatcttggggatctcattagtataccaggccaagtcttaaggtcttccctgtcaatttcatgggtcaaaattctcagttcttttacaggctccttttcttttacccaagtgtaaaatggtggaattccttgaagctctgccctaggctcttttcctttctctctatgcttctgttatagtttttgtttttgttttcaaatttacagctcaatttgagttttttccctgagttttagacacattattgaactgactatgtgacatcttcccttaggtggtattttagacacttctaactcaactgtcacaaactgaattcgtaatctttcccatccctgaatctcttatcttttcccagtttccttttctcagaaattccaatccagttgctcaaatttcaaaatcttggaaatcattcacgatgccatccttatcccctgcaaatagcaactgactgctttaattctgctacttaaaagtatcttatgtcatcactcttctcttcatccccagtccaagccaccatcgtctctcctgttctacaatactttgtcttacttctcttcccatttccactcatagtcgattttgttcactgaaaccatagtaatctgtttagagtgtgcatctaattattcctttttctgcgtaaaatctttaatgtggcacataaagtcttatgtgatccggcatctacccatgtttatagcctcattttgtggccctctccttgctgttaaatatttcaggcccaggggccctttcacatgctgtttcctttgcttagaacgcatctttcttcttcctgccccacccttgttagatacgcattcatctggccagacctgatggctcatgcctgtaatcccagcactttgggaggccgaggcaggagaatcacttgaacctaggagttcgcaaccagctcgggcaacatagtggcaccctgtctctaccaaaataaaaataaaaagaaagatacacattcatcctttacgtttcaacttaaacattaaaagattatttcctcagcctttttcttatggagcctaatcccaggtctaagttaagtccacctattatatcaccctgtggttctacatagttcatctatctttgctccaatctgtacgctcttcataaagacagtgactgatttttgttcactgtctctgtattttgccactgttgcaggtgaatggaggaaaattttcctaaatatgatttggattttctttaaccaaattaattttcacttacctacattcaaacatgtctgtcattcctgctagtaataaagttttgcataaatcttcctacatttaaatcccttggcttggaattcttgacccacgacagaactttgttttacaaacttgcagattcttctgcatattgaacttcccagatcacttattaaaaatattaacgtactggctgtcttgcagatgaatgacctaattagacttgtagtatccaagaattgcctgtttatattcatctttttctttctgagtcccgtgatgattaatatttgatgaattatattttgaatagcctccacatgcatttttctcttttgttcacttcctcaccattttgcttcactttttttttaactgcttcctttgtgtctttcccattcctttacctttgttttctccttgacttcctattgttggccattgtgggcattgtttagcattttcagtggaaagaatcaggggaaagaaaatactaaatcttagtatagttaatatttgatattatcaacgagaagtaagaaatgttttgaaaaacacaaatcagtagttttatataacttaataaattgaacagatgatcattttttgtaaaaaaaaaaaaaaacaaaactttttagtttttcttcatgcacagtttcatttaaaggcatccgtattcctaagggtaattatttgccaaaaaaaaaaaattaaagtagttaggccacagtgtatgacaataaagagtgtttataaagccctaataataataataagttacctttttctgcttatgttcacgaagaactagtgttagaaaatagccttcttcactgttggcaaggtgcagtgtatatgcagtaaatagaaaataattatttcgctcagcaagataaggggctgggggtggagaaactggcataaaatggaataattgtcagttgtactttataaatatattatacagaagttctttataacagtttttgtagcttataattctaaaggcaaatttaaaccatatattctcattgattgagtttttttttcctagtatttaagttaccaacttggtaccagtttgttttattttagatgattgtctttttcctcttgccctttttaaattagggggactacaggccattgcagaattattgcaagtggactgtgaaatgtatgggcttactaatgaccactacagtattacactaagacgatatgctggaatggctttgacaaacttgacttttggagatgtagccaacaaggtatgtttttataacatgtatttcttaagatagctcaggtatgagttaatttactttcatacaaatacattttactgattttcttttttttcactctcctcattaaacaatgactgataaaaacctgtgcttcacattcgcttatctttactcatttgtttgtcttatgcctaaacaaaggcaaaggtacatctacagatggaacacagtagtgaatttatgtaattgcattaaaaacaccattcataagaatatacttgtagggatcatttctgtgatccattactagagaagtttaactgtgtagaattaaaaaataaaagataaaacacttcctaggaatgggattaaaaatctaaaaattcttaagaccaaggcaagtgttacacacacattgattccatccaaataagaggctttactctaaaacctgttgcttatcatttctcaccacttattcactttatttctctagtttgacaaaggaagaacagatagcaaagaattaggagaatatttgtcttttatttaggtaatcttattctagattttttatgagtgaagtatcagttatgattaaaacaaaataatgaaaactgaattagacatttagtagccaaaaataaagcttggcttcaagttgtctttttaatgatcctctattctgtatttaatttacaggctacgctatgctctatgaaaggctgcatgagagcacttgtggcccaactaaaatctgaaagtgaagacttacagcaggtactatttagaatttcacctgtttttcttttttctctttttctttgaggcagggtctcactctgtcacccaggcttagagggcagttgtgcaatctcagctcactgcaacctctgcctccagggttcaagcaatcctcccacttcagcctctcgaggctgggcctacaggtgcacaccaccatgccaaacgaatttttgtattttttatagagacggggtttcaccacacctgggctcaagcaatctgcccacctcagcatctcaaaatgctgggattacaggcgtgtgccaccacacccagctaatatcctgatttagattgttgctcagtatttagtatctcatgtataaaagatagttccattaacactagaaaaagaaaaataattatattgtggttagactgtaggaaatctttttggcactgtagtagcatttaggaggaatttaaaaaaaaaaaaaaaaacaggatctccctctcttgcccaggctggagtgcagtggtgcgattatggctcacagtaacctcaagctcctgggatcctcctgcttcagcctcccaagtagctagaactactgcaggcgcatgccaccatgcccagctaatttttaaaaagttttcatagagacagggtctcactgtgttacccagaaggtcttgaactcctggtctcaggagatcctcctgcctcagcctcccaaagtgataggattacaggcgtgagtcaccacggctagccagaatttctttcttaatagatttctattcttactgctagcattaaaaacaaaaaagcaactagtatgattttatgtataaattaatctaaaattgattaatttgcaggttattgcgagtgttttgaggaatttgtcttggcgagcagatgtaaatagtaaaaagacgttgcgagaagttggaagtgtgaaagcattgatggaatgtgctttagaagttaaaaaggtacctttgaaaacatttagtactataatatgaatttcatgtttggcttttttttgctgccttcttttagccatgagatttcctaatttcttacctgtgtattattcagtactataatatgaatttcatgtttagctttttttgctgccttcttttagccatgagattccctaatttcttttttgagatggggtctctttctctcgcccaggctggagtgcagtggtctgatcttggctcactgcaacctccgtctcccatgttcaagtgattctcctgcctcagcctcctgagtagctgggattacagtgcacgccaccactcccggctatttgtatttttagtagagatggggtttcaccatgttggtaaggctggtctcgaactactcctgactttgtgatctgcccaactcggcctcccaaagtgctgggattataggcgcaagccatcacgcccagcctagattccctaatttcttacctgtttatctcaccagtccatagttttagagtaccgcaaactcctaaagtactaaggtagaaaagattatataaggggatttaatgtatatcagggtttctctgcctcagcactatagacatttttgaccagataattcttcgttttgctggggctgacctgtgcactgtagattgtttagcagcatccctggcctttgccaactggctgccagtataccctccccctagttatgccgatcaaaattgtctccagatactgtcagatgtctgtgggagggaggaaggacaacgtcaccaccaattaagaatcactggtataagtgtacctttgtgctctccaaacctcaatcccctcaaattttgatggtcaacttatcaagaggtgatcagagccaagggtgaggaatcatcaaataataatttgtttacagaaggaaatatctccaggcagtccatctgcttcagaaactaggctaaatttaaaaagaaaaaaaaaagtaaacttgaaatctgagagggaccaagcaagttgtcttagctagtctaggtttcctttcacccagctagtcctcctatacccacagcctacatgttcttcttcaaaactttcctcttcagagaaggcaaaaggtttgtttttttttggtttagttatgcatttttggtaaagtatattattttgttcttggaaaacccttgaaaatttattagatagaaaagcattcagctaaattattagttataaagataatattcaaatatacttagcatctgcataaaaatacctgtatcactgttgaatggagagaagacatttaagaaaagaacatggccgataagcccttgaaaagatacttaatatcattaatcatcagggaatacaaattaaaactacaatgagataccattatgcatatcatattggttaaaatttaaaagattgaccatgcattttcaaggatgttgagcagctggaaatcatgtattctgctagtgggaatataaaatggtataatcactttggacaacatttggcagtgtttttaagttaaacatacacctgccatatgacccaaccattccacttctaagtatttacccaagaggagcaaaagtgctgacacgaagacttacacacaaacatccacaataatttatgatagtcaaaaactagaaataactatgtctgtcagcaggtgaatggtaagcaaattgtggaatatttgtacaaagtaataggattcggctgtgaaaaagaatgactattgatacatgcagtaatctgtaatgacagaaaacagattagtggtggcctggggttgggagtagaagagaaggggaggattatgagagggtaggaaacttttggggatgatataaatgtttgttatcttgattggactggcagttttatgggtgtatacatgtatgaaaaattatcaaattgtaaacttgaaatgtgtgcagtttactgttcttcaattatatttcaataaagttcaaaaaaattagtgcttgcacacttaagtactcctactctaataaccctgtgtagtttcagaaggatttaatgtgtgtgtgtattatgagaatttgcactgctgctaactggttcatgacttaattctctctcaaggacctaaactcttctataaattttttttttttttgagatggagtcttgctctgctgccaggctggagtgcagtggcaggatctcggctaactgcaacctccaactccctggttcaagcgattatcctgcctcagcctcccaagtagctgggattataggcatgcgccaccatgcccagctagtttttgtatttttagtagagacggggtttcaccatgttggccaggatggtcttcatctcctgacctcatgacccgcctgccttggccttccaaagtgctgggattacaggcatgatataatgcatggtcaatcttggaaaaactagctgtcagaaatttataatatccagttctgatttgggcctaattctggttagcagtattagaatttatttattttttccctctttttctacatttagtgcagcagtcatgaacattcttcttctctttttcattcaatatcaattccctctcaacttcagctactaatgagcaagagaatcagaactaccttctagctcccctgcatgttccacatcactttaactcactcagagctcttactctagagctttcctttaccagcactctgtactccgttcacttaaagctgttggtcccttactcttgtcttctacatattctctactggatccttcttttttatgtttcagttctctagaagaagcccaatgttttgaaaaacaaaaattttctgtggcttctattacagtgtttctcttttccagtaacaaccaaaaccctgaacaatggttttgaccaaatacctttgtgtatcagagtgtttctggggcagttacaatttgacagttgactttgacttgcttcatttctaaactggctgtactatcttgagttcctcctaattttgcttctgacacaacccttctccttgatcatagaatctagatttgtagatttatttaagtttttctattctaccttcacctgtattttatactttttggtcactcacttttgctgttactacttgtattaataacctctaattatttattttgtgtcttctaatttgaactataaaaacatttttgaaacaaaacctctggcccttgacatgtagccccacagagaggaacttttgtatttttctaccttcaactctcaactctgggccagttgcatcttaattcagtcctttaaattcttgctttttttgttctcaggatacttggagtgccccacctttatctcagtcacaatgtaattaaaattgggctcatcttgattgatgtgagaaggacaaaggcacttcttgcataaaagcactctatctgcctcctaccacttatgtgacaaattatgtctaaacctgctcctagattgttttgttcacttaatttcttgatgaagagagtaaagtagctatttattgggttagacccaaaatgtttgctgtgacattcaaggcctggcttttgtctctctggacttattttccactgttccccatcatggactgtgatctcctttgcatcttctttctgggtcatcagtactcccgcgctgattcccacttccctgcctttcctcattctacttcccctgccagcagcaactggattctcttctctgggaatgtacaggtctaatcctcctaaagagctgttctcctccatgaaatatttgattgatttgattaaattcagggtgtaatagttttttctttggagcactttgtttcatgtatatttttgtatctttttttccccccaaagcaaattgctaacaccttcaatcactggtatcagtttgctatgtttgcatcctctagagtgcctctcattgcaataggcacagagttgatttctaattaatgtttgtttcctgatggatatatagtaagaagacagattgacatcaccatcatgccaagttttgggtttgggttttttttttttgcttttgcttttgcttttgcttttttgagacagggtctcactctgccacacagccttgacctcctgggctcaagctagcctcccgcctcagcttctcaagtagctggacctataggtgtgcaccaccatgcctggctaattttttttttttttttttttgagaccgagtctcgctctgtcacctaggctggagtatagtggcgcaatctcggctcactgcaacctctgcctccctggttcaagcgattcccctgcctcagcctcccaagtagctaggattacaggtgcccaccaccacaccgggctaattttttgtattttagtagagacagggtttcaccatgttgatcaggatggtctcgatctcctgacctcgtgatccgtgcaccttggcccctcaaagtgctgggattacaggcatgagccattgcgcctggccgcctggctactttttatattttttgtagagattgggtattgctgtgttgcccaggctggtttttaactcctaggcttaagtgatccacccacctcagcctcccaaagtgctgggcctgaaggcatgagccaccacacccagcacatggcaagttttgaccaaatacctttaattgtgtatcagagtgtttctgtggccattacaatttgacagttgactttgataattgtatgttagggagttccaggttttcataatttgttatgtggggaattttaagaaattatagcttttctagtaccctttattgtttttataaattacattgttaattttgaatcaaccacttgtatataatgctttttatataaacagaatattgtatatactacactgcaacttgctcttgtcatttaataatacttccaagatatctttccatatctatgtatggtttacagaattttaaaaatctactttcttttttttttgagacagggtctcactgtcaaccaggcttgagtgcagtggcgcgatcatggcttactgcagccttgacctcccaggcgcaagtgatcctcccaagcagctgtgactgcaggcgcgtgccaccatacccagctcattttttttttattttttgtacagacgggatttcaccatgttgtccaggctggtctcaaattcctaaactcccagtcacgccagtcagccttccaaagtgctgggattacaggcatgagccaccacgttgcgccttttttttttttttttttttttaaaaagagtttcgctctgtcagccaggctagaatgcagtgttgcagtctcggctcactgcgacctctgcctcccaggttcaagcgattctcccacctcagcctcccaagtagctgggattacaggcacctgccatgaagcccggctaatttttttttgtatttttgtagagacggggttttaccacattggcgaggctggtcttgaactcctgacctcagatgatccacccgtcagcctcccaaagtgctgggattacaggcatgagccactgtgcccggccacatgccgggccttaatccacttcctgttcacttttttttttcttttttcaagcaaccccagcctgagaataacccacattctattctgaaaatgttttcttttcataatgcacatcagttgtgcctcatattctaagatgtgtgtactatctaaacacttagaataaagtttataaaagtcattagttaaatattgtgttctgcttgttttatagagatatcactgatataaatactatttggtattttatgaacatttttctaaatggaaagttcttaatttaccagtgagggacgggcaataggatagattaaaaaatagcttttattcaatatcagtaacatagaagttaatgagagacaaattccaactctaattagatgacccatattctgtttcttactaggaatcaaccctcaaaagcgtattgagtgccttatggaatttgtcagcacattgcactgagaataaagctgatatatgtgctgtagatggtgcacttgcatttttggttggcactcttacttaccggagccagacaaacactttagccattattgaaagtggaggtgggatattacggaatgtgtccagcttgatagctacaaatgaggaccacaggtatatatagagttttatattacttttaaagtacagaattcatactctcaaaaagacctaattgtaagcaatgttttatataatcatgaaagttttaagccaaaatatatttattactgtgaaaagataactactaactcttagtttaactcattagtgtacttaatgtaataacagtttatagtattatagaggagactaaattaagcaaattatagttgagaggtgtagcccataggtggaggaaaaaatagtcacaaatattgtaacaaaataatccatttctattagtatagtataaaagagtatgaaaacaaaatttagaacaagacaaaaactatgagcgtgatccagagaatataaaggttcacatttttctaatgatgtcttagtatccataataataattttttttttttttttttgagacagggtctcactctgtctcccagactggagggcagtgttgtgatcttggctcactgcaacctccacctcctgggttcaagcgattctcccacctcagcttcccaacaagctgggactacagatgcacgccacaacacccggctaatttttctattttttggtagagatggggtttcacaatgttgtccagctgctcttgaactcctggcctccagtgacccacctgtctcagcctccctaagtgctgggattacaggtgtgagccaccgcgcccggccaataatcataatattatttagctaacagccattcatccaatctgctagagttgtaaaacccaagagagtgcttcagatacagggcacacattttcagaactcggatgctgtattatatcaacaaaaatacaactgtcttttttttttttttttttttttttttcttgagatggagtcttgcactcttgcccgggctggagtacagtggcacaatctttgctcactgcaacctctgcctttggggttcaagcgattctcctgcctcagcctcccgagtagctgggattacaggtccccccccccccccgccaccgtgcccggctaatttttatatttttagtagagacggggcttcaccatgttggccaggctggccttgaactcctgaccttaggtgatccgcccacctcggcctcccaaagtgctgggattataggcatgggctactgcgcctagccaaaaatatggttgttttttatagcttattcattttttaagtctgtgatgcagaaactacaagcctagtctccctttctgctatacagagaagatttcttaagtccagtaactactggactgctaagagaagacgaccatgttaaagctcattatgtacccttgccattcagttttaaagcccactaaagctgaatatgctgtcattaatcttcagtttgcctgcgttaaacaagctgttgctctttcatgtccagagttcattatgctgattctcactccttgtttttatatgccttaaatgtttcaaaaactttaatttacttgattttttaaaaataataagcacacagtctgccaaagagcagtttttcttttcttttttttcttttttttgagatggagtctcactctgttgtccaggttggagtgcagtggtgtgatctcggctcactgcaacctctgcctcccaagtgattctcctggctcagcctcctgagtagctgggactacaggcatgcactaccatgcccggctaatttttgtatttttagtagagacagggtttcaccatgttggccaggctggtcttgatctcctaatctcaggtgatccgcctgcctcagcctcctaaagtgctgggattacaggcatgagccactgtgtctggccaagagcactcgtaagaaggatggcagtatcacaaaatcaagccagagatacagagattactctaaaaagtaagtgttctaatctaagagcttataatgtgcactgactgcagaaaaatcttcaatcaattctatctacctcttccaagataactcaatatcaatatcagagtggcacccaaccatagattaaattaccacaaagttcctattcaacataggatttcatgatatagtttttaaattgggaaactgttatatgaatagagtaaatgtatgtgccccaccccctgcaaatgttttaagctattgggtcagaataggaaatgtagaattgacaaaaaataacacctttactttttttagtgtgacagattagtactttaaaacattaaacattacatgaaattagaacaaaaggagatgtggaatacttggaatttataggataattggtacaatcatattatgccttttgtcttctatccttttatttgttgttactgcatacacattgtgaccttaattttgtgatctcttgattttatttcaggcaaatcctaagagagaacaactgtctacaaactttattacaacacttaaaatctcatagtttgacaatagtcagtaatgcatgtggaactttgtggaatctctcagcaagaaatcctaaagaccaggaagcattatgggacatgggggcagttagcatgctcaagaacctcattcattcaaagcacaaaatgattgctatgggaagtgctgcagctttaaggaatctcatggcaaataggcctgcgaagtacaaggatgccaatattatgtctcctggctcaagcttgccatctcttcatgttaggaaacaaaaagccctagaagcagaattagatgctcagcacttatcagaaacttttgacaatatagacaatttaagtcccaaggcatctcatcgtagtaagcagagacacaagcaaagtctctatggtgattatgtttttgacaccaatcgacatgatgataataggtcagacaattttaatactggcaacatgactgtcctttcaccatatttgaatactacagtgttacccagctcctcttcatcaagaggaagcttagatagttctcgttctgaaaaagatagaagtttggagagagaacgcggaattggtctaggcaactaccatccagcaacagaaaatccaggaacttcttcaaagcgaggtttgcagatctccaccactgcagcccagattgccaaagtcatggaagaagtgtcagccattcatacctctcaggaagacagaagttctgggtctaccactgaattacattgtgtgacagatgagagaaatgcacttagaagaagctctgctgcccatacacattcaaacacttacaatttcactaagtcggaaaattcaaataggacatgttctatgccttatgccaaattagaatacaagagatcttcaaatgatagtttaaatagtgtcagtagtagtgatggttatggtaaaagaggtcaaatgaaaccctcgattgaatcctattctgaagatgatgaaagtaagttttgcagttatggtcaatacccagccgacctagcccataaaatacatagtgcaaatcatatggatgataatgatggagaactagatacaccaataaattatagtcttaaatattcagatgagcagttgaactctggaaggcaaagtccttcacagaatgaaagatgggcaagacccaaacacataatagaagatgaaataaaacaaagtgagcaaagacaatcaaggaatcaaagtacaacttatcctgtttatactgagagcactgatgataaacacctcaagttccaaccacattttggacagcaggaatgtgtttctccatacaggtcacggggagccaatggttcagaaacaaatcgagtgggttctaatcatggaattaatcaaaatgtaagccagtctttgtgtcaagaagatgactatgaagatgataagcctaccaattatagtgaacgttactctgaagaagaacagcatgaagaagaagagagaccaacaaattatagcataaaatataatgaagagaaacgtcatgtggatcagcctattgattatagtttaaaatatgccacagatattccttcatcacagaaacagtcattttcattctcaaagagttcatctggacaaagcagtaaaaccgaacatatgtcttcaagcagtgagaatacgtccacaccttcatctaatgccaagaggcagaatcagctccatccaagttctgcacagagtagaagtggtcagcctcaaaaggctgccacttgcaaagtttcttctattaaccaagaaacaatacagacttattgtgtagaagatactccaatatgtttttcaagatgtagttcattatcatctttgtcatcagctgaagatgaaataggatgtaatcagacgacacaggaagcagattctgctaataccctgcaaatagcagaaataaaagaaaagattggaactaggtcagctgaagatcctgtgagcgaagttccagcagtgtcacagcaccctagaaccaaatccagcagactgcagggttctagtttatcttcagaatcagccaggcacaaagctgttgaattttcttcaggagcgaaatctccctccaaaagtggtgctcagacacccaaaagtccacctgaacactatgttcaggagaccccactcatgtttagcagatgtacttctgtcagttcacttgatagttttgagagtcgttcgattgccagctccgttcagagtgaaccatgcagtggaatggtaagtggcattataagccccagtgatcttccagatagccctggacaaaccatgccaccaagcagaagtaaaacacctccaccacctcctcaaacagctcaaaccaagcgagaagtacctaaaaataaagcacctactgctgaaaagagagagagtggacctaagcaagctgcagtaaatgctgcagttcagagggtccaggttcttccagatgctgatactttattacattttgccacggaaagtactccagatggattttcttgttcatccagcctgagtgctctgagcctcgatgagccatttatacagaaagatgtggaattaagaataatgcctccagttcaggaaaatgacaatgggaatgaaacagaatcagagcagcctaaagaatcaaatgaaaaccaagagaaagaggcagaaaaaactattgattctgaaaaggacctattagatgattcagatgatgatgatattgaaatactagaagaatgtattatttctgccatgccaacaaagtcatcacgtaaagcaaaaaagccagcccagactgcttcaaaattacctccacctgtggcaaggaaaccaagtcagctgcctgtgtacaaacttctaccatcacaaaacaggttgcaaccccaaaagcatgttagttttacaccgggggatgatatgccacgggtgtattgtgttgaagggacacctataaacttttccacagctacatctctaagtgatctaacaatcgaatcccctccaaatgagttagctgctggagaaggagttagaggaggggcacagtcaggtgaatttgaaaaacgagataccattcctacagaaggcagaagtacagatgaggctcaaggaggaaaaacctcatctgtaaccatacctgaattggatgacaataaagcagaggaaggtgatattcttgcagaatgcattaattctgctatgcccaaagggaaaagtcacaagcctttccgtgtgaaaaagataatggaccaggtccagcaagcatctgcgtcttcttctgcacccaacaaaaatcagttagatggtaagaaaaagaaaccaacttcaccagtaaaacctataccacaaaatactgaatataggacacgtgtaagaaaaaatgcagactcaaaaaataatttaaatgctgagagagttttctcagacaacaaagattcaaagaaacagaatttgaaaaataattccaaggtcttcaatgataagctcccaaataatgaagatagagtcagaggaagttttgcttttgattcacctcatcattacacgcctattgaaggaactccttactgtttttcacgaaatgattctttgagttctctagattttgatgatgatgatgttgacctttccagggaaaaggctgaattaagaaaggcaaaagaaaataaggaatcagaggctaaagttaccagccacacagaactaacctccaaccaacaatcagctaataagacacaagctattgcaaagcagccaataaatcgaggtcagcctaaacccatacttcagaaacaatccacttttccccagtcatccaaagacataccagacagaggggcagcaactgatgaaaagttacagaattttgctattgaaaatactccggtttgcttttctcataattcctctctgagttctctcagtgacattgaccaagaaaacaacaataaagaaaatgaacctatcaaagagactgagccccctgactcacagggagaaccaagtaaacctcaagcatcaggctatgctcctaaatcatttcatgttgaagataccccagtttgtttctcaagaaacagttctctcagttctcttagtattgactctgaagatgacctgttgcaggaatgtataagctccgcaatgccaaaaaagaaaaagccttcaagactcaagggtgataatgaaaaacatagtcccagaaatatgggtggcatattaggtgaagatctgacacttgatttgaaagatatacagagaccagattcagaacatggtctatcccctgattcagaaaattttgattggaaagctattcaggaaggtgcaaattccatagtaagtagtttacatcaagctgctgctgctgcatgtttatctagacaagcttcgtctgattcagattccatcctttccctgaaatcaggaatctctctgggatcaccatttcatcttacacctgatcaagaagaaaaaccctttacaagtaataaaggcccacgaattctaaaaccaggggagaaaagtacattggaaactaaaaagatagaatctgaaagtaaaggaatcaaaggaggaaaaaaagtttataaaagtttgattactggaaaagttcgatctaattcagaaatttcaggccaaatgaaacagccccttcaagcaaacatgccttcaatctctcgaggcaggacaatgattcatattccaggagttcgaaatagctcctcaagtacaagtcctgtttctaaaaaaggcccaccccttaagactccagcctccaaaagccctagtgaaggtcaaacagccaccacttctcctagaggagccaagccatctgtgaaatcagaattaagccctgttgccaggcagacatcccaaataggtgggtcaagtaaagcaccttctagatcaggatctagagattcgaccccttcaagacctgcccagcaaccattaagtagacctatacagtctcctggccgaaactcaatttcccctggtagaaatggaataagtcctcctaacaaattatctcaacttccaaggacatcatcccctagtactgcttcaactaagtcctcaggttctggaaaaatgtcatatacatctccaggtagacagatgagccaacagaaccttaccaaacaaacaggtttatccaagaatgccagtagtattccaagaagtgagtctgcctccaaaggactaaatcagatgaataatggtaatggagccaataaaaaggtagaactttctagaatgtcttcaactaaatcaagtggaagtgaatctgatagatcagaaagacctgtattagtacgccagtcaactttcatcaaagaagctccaagcccaaccttaagaagaaaattggaggaatctgcttcatttgaatctctttctccatcatctagaccagcttctcccactaggtcccaggcacaaactccagttttaagtccttcccttcctgatatgtctctatccacacattcgtctgttcaggctggtggatggcgaaaactcccacctaatctcagtcccactatagagtataatgatggaagaccagcaaagcgccatgatattgcacggtctcattctgaaagtccttctagacttccaatcaataggtcaggaacctggaaacgtgagcacagcaaacattcatcatcccttcctcgagtaagcacttggagaagaactggaagttcatcttcaattctttctgcttcatcagaatccagtgaaaaagcaaaaagtgaggatgaaaaacatgtgaactctatttcaggaaccaaacaaagtaaagaaaaccaagtatccgcaaaaggaacatggagaaaaataaaagaaaatgaattttctcccacaaatagtacttctcagaccgtttcctcaggtgctacaaatggtgctgaatcaaagactctaatttatcaaatggcacctgctgtttctaaaacagaggatgtttgggtgagaattgaggactgtcccattaacaatcctagatctggaagatctcccacaggtaatactcccccggtgattgacagtgtttcagaaaaggcaaatccaaacattaaagattcaaaagataatcaggcaaaacaaaatgtgggtaatggcagtgttcccatgcgtaccgtgggtttggaaaatcgcctgaactcctttattcaggtggatgcccctgaccaaaaaggaactgagataaaaccaggacaaaataatcctgtccctgtatcagagactaatgaaagttctatagtggaacgtaccccattcagttctagcagctcaagcaaacacagttcacctagtgggactgttgctgccagagtgactccttttaattacaacccaagccctaggaaaagcagcgcagatagcacttcagctcggccatctcagatcccaactccagtgaataacaacacaaagaagcgagattccaaaactgacagcacagaatccagtggaacccaaagtcctaagcgccattctgggtcttaccttgtgacatctgtttaaaagagaggaagaatgaaactaagaaaattctatgttaattacaactgctatatagacattttgtttcaaatgaaactttaaaagactgaaaaattttgtaaataggtttgattcttgttagagggtttttgttctggaagccatatttgatagtatactttgtcttcactggtcttattttgggaggcactcttgatggttaggaaaaaaatagtaaagccaagtatgtttgtacagtatgttttacatgtatttaaagtagcatcccatcccaacttcctttaattattgcttgtcttaaaataatgaacactacagatagaaaatatgatatattgctgttatcaatcatttctagattataaactgactaaacttacatcagggaaaaattggtatttatgcaaaaaaaaatgtttttgtccttgtgagtccatctaacatcataattaatcatgtggctgtgaaattcacagtaatatggttcccgatgaacaagtttacccagcctgctttgctttactgcatgaatgaaactgatggttcaatttcagaagtaatgattaacagttatgtggtcacatgatgtgcatagagatagctacagtgtaataatttacactattttgtgctccaaacaaaacaaaaatctgtgtaactgtaaaacattgaatgaaactattttacctgaactagattttatctgaaagtaggtagaatttttgctatgctgtaatttgttgtatattctggtatttgaggtgagatggctgctcttttattaatgagacatgaattgtgtctcaacagaaactaaatgaacatttcagaataaattattgctgtatgtaaactgttactgaaattggtatttgtttgaagggtcttgtttcacatttgtattaataattgtttaaaatgcctcttttaaaagcttatataaatttttttcttcagcttctatgcattaagagtaaaattcctcttactgtaataaaaacaattgaagaagactgttgccacttaaccattccatgcgttggcacttatctattcctgaaatttcttttatgtgattagctcatcttgatttttaatatttttccacttaaacttttttttcttactccactggagctcagtaaaagtaaattcatgtaatagcaatgcaagcagcctagcacagactaagcattgagcataataggcccacataatttcctctttcttaatattatagaattctgtacttgaaattgattcttagacattgcagtctcttcgaggctttacagtgtaaactgtcttgccccttcatcttcttgttgcaactgggtctgacatgaacactttttatcaccctgtatgttagggcaagatctcagcagtgaagtataatcagcactttgccatgctcagaaaattcaaatcacatggaactttagaggtagatttaatacgattaagatattcagaagtatattttagaatccctgcctgttaaggaaactttatttgtggtaggtacagttctggggtacatgttaagtgtccccttatacagtggagggaagtcttccttcctgaaggaaaataaactgacacttattaactaagataatttacttaatatatcttccctgatttgttttaaaagatcagagggtgactgatgatacatgcatacatatttgttgaataaatgaaaatttatttttagtgataagattcatacactctgtatttggggagggaaaacctttttaagcatggtggggcactcagataggagtgaatacacctacctggtgccttgaaaatcacatcaagtagttaattatctaccccttacctgtgtttataacttccaggtaatgagaatgattttttttaaagctaaaatgccagtaaataaaagtgctatgacttgagctaagatatttgactccaatgcctgtactgtgtctactgcaccactttgtaaacacttcaatttactatctttgaaatgattgacctttaaatttttgccaaatgttatctgaaattgtctatgaataccatctacttctgttgttttcccaggcttccataaacaatggagatacatgca

SEQ ID NO: 4 - DNA, 146036 bp, Homo sapiens
  source 1..146036: mol_type = genomic DNA; note = ATM_gene
aggtagctgcgtggctaacggagaaaagaagccgtggccgcgggaggaggcgagaggagtcgggatctgcgctgcagccaccgccgcggttgatactactttgaccttccgagtgcagtggtaggggcgcggaggcaacgcagcggcttctgcgctgggaaattcagtcgtgtgcgacccagtctgtcctctccccagaccgccaatctcatgcacccctccagagtggcccttgactcctccctctcctcactccatctttcctggcctctctccgggtgcttagcggacttggccaataacctcctccttttaaacgccctgaattgaaccctgcctcctgcgcatcctctttttgtgtcaccttagggttcagatttaactacgcgacttgactagtcatcttttgatctctctctcgtatttagtacttttagtcagcgagcatttattgatatttcaacttcagcctcgcggttaagagcttgggctctggaatcatacggctggaattggaattctgtcagtcgtgtggccgctctctactgtcttgtgaagataagtgagataatcttgacctgtggtgagcactcgtgagcgttagctgctgtatttaccaggtacagataagacaactacagtggatgataatgtatgtggtgataggggagtactctgatggtagaggagtgactttggttctctgcaaactcagcctgagactatcaattcagtttgtggtgagacctcgcagtgttaccttggcagatggtagaagccttccagatggaaggaaaaatgcgtgtaaaggcacaaagtgtagaaggaccctgaagctccagcgtgaggcctggcattgaatgaaatatattttgtgggttttcagctgctgaagtcataggaatggatgagaccaagaaaacaaagctgtttttgaggtatgagcggaagaagagatatcaggagactttcgaaacagtcataacggaagttaatatgatcattgctaacatttgctgtgtttcaggcactgtaagcatgtatatgggtccttaaagggactcatagaggtaggtactagtattgtttttccttttatcattgagaaactgaggtttgaagagattagtgaacttgctctagattatacagtttgtaagtggctgaaccaggatttgaactaatacaatctgactacagaggccacactccttagcactagaaaagaatggcatgccaagggcagagttatttctaggaagatgggatataagcgtcattgtcaagttgtgcaaaggggtcaacttggttgagatctaaaaaggaacactgaattcgtcaattcagaggctcgtaggaagtaggaaatccttatcttttcgtttgaaccttgagtggaacctagatattctggattaatgtataaatgaagttcatctttatatggtgacactcatactctagttgactacctaatagttcctctgccttctttcagttccgccaacatactgtgttctttaacattgtagaaccctttggctatgctagtctccttccctgaagtgttggtcctctagccctttttttgattggcaccagttagttcagatcttggctttattataaactcctctgagatatatgttccctgacagtttatctaaaatgattctctctacagttattttctattactgtgtttttgtttcctcagaggcatacatcacaatttggaattatgcattggtttatcaatttacttgtttattgtcaccctgctgcccagatatgacttcatgagggtaggatttgtatctgtttagttcattatttgtctagctataagtagtaaatattgtttgcatctatcagtgaatgagcatcttctgtttatgtagataatactgaactgttttgttttcttcaaagtaatcattaagctgaaggtaagaaaaacaagttcaaggaagtcacaccatggggaaaaaaaagtcaagtttagggctgcctcttccgggaagtgtcaaatctttagtatatttaggaataaaggtgccaaaccttatggttctttggatattgctaaggtattttcattggttagattaccagtttcattttccttattgactcaagagggctttaaactgagattgaagaagtaagaagattcctagataaaaccataaggaatggaaaaacaaaaatgataatacttgtccacaggaagtatataatcaaatgaaaagaactcaaataacaatctgtaatctatagcagagtaaagcggaagttgtaatagtgttgggggatgggggaagtcagaagaaccaccagtgaatataaaaggagaagagaatcagagccatctgctaataaaatgggtagtcagctctttttgttttttttgtcttgttttgttttgagacagtctcgctctgtcgcccatgctggagtgcaattgcgtgatctcagctaactgcactttccgcctcctgggttcaagtgagtctcctacctcagtctccccagtagctaggattgcaggcacatgctaccacacctggttaatttttgtatttttagtagagacggggtttcacgatgttggccaggctggctggtctcgaactcctgacctcgtggaacgcccacctcggcctcccagagtgctgggattacaggcatgagccaccacgcctagccccggtagtcagctcttactgagaatattcaaagacagggcattcattttgtaagagacattccttccttcataggaagattggacctggtcttttagttcctcccaattttgagattctgtgagattgaatcggggcagagaaacatacttaatcttgaaagattaagtagaatttagatggatggataggagaaggactttccctacctttttacttcttgagatatagttatttgtaggtataatatacataaatatatgtattttttctctgtttacagacattcatagtttaataaaaaacttctttgtattatataaaggtttagatcagaactagtaaaacagaatgctgtttctttttttttcttttctattttactttaggttctgtgggtagatgtgcgggtttgttacatgggtaaattgcatgttgctgaggcttggtgtacgaatgatcctgtcactcaggtagtgagcatagtacctgataggtagcccttcaagccatacctccctttctttccaaccctcaaacagtccccagtctctgttcttcccatctttgtgtccatgttgaaatgctgttcttactacatttttttgaaggacatcaaaagagagtttgattatatcagaagcccccaaaagaagagagctactcagtggaatcaaggcatagtaaaatatagttgatccttgatatttgcaaaggataccaccatagcatagaatttgcttcatttccttttaaaacagaaatgtcattttactcctattgttatgtgttaaataagaaccttaataccagttgagatggaagtggtagacaaagcttactagctctgataacctcctacttatcagctccaaagcatgttttaagcctttggctcagcaaaatgacatgtctctccatataagcaagagtgcttttttttttttctttgagacggagtcttgctctgtcaccaggctggagtgcagtggcgcgatctccgctcactgcaacctctgcctcctgggttcaagcgattctcctacctcagcctcctgagtagctgggactacaagagcacactaccacgcctggccaagagtgcttttaaatagttcattgtcaatgttaaatccttgagtgctcatttccttatttacctggctgttttctattcatctttcatgtctcaatttaaatgtcatgtttctttggtctcagagtaataaaaagtaaatatacttcccccatctcccgccccgcagagccttcctctgttgcccaggctggagtacagtggctcgatcttggctcactgaaagctctgcctcccagattcaagcgattctcctgcctcagcctcctgagtagctgggattacaggcgcgcgccaccaagcccggctaatttttgtatttttagtagagacagggtttcaccatgttggtcaggctggtcgaactcctgaccttgtgatcctcccaccttggcctcccaaagtgctgggattacaggcgtgagccactgcgtccagtgtaaattatacttttattttaatcctgctactactgcaagcaaggcaaacatttttgtgttacagcattacttgtatagattttaagaaaatctcattttaaatacggaaatgttaagaaaaattattgtgcctttgaccagaatgtgcctctaattgtacagttaaatctaactataaatactgcagtataaaataattatatacacattttttcacacctctttctctctatatatgcatatatacatatacatatatatacctatatgtattttttttacagacagtgatgtgtgttctgaaattgtgaaccatgagtctagtacttaatgatctgcttatctgctgccgtcaactagaacatgatagagctacagaacgaaaggtagtaaattacttaaattcaatttttccttgaaataagtgtgattagtaacccattattatttcctttttattttcagaaagaagttgagaaatttaagcgcctgattcgagatcctgaaacaattaaacatctagatcggcattcagattccaaacaaggaaaatatttgaattgggatgctgtttttaggtattctattcaaatttattttactgtctttatttttctctttcatatttatttctgttgtgatattacttttgtgtgtaagtcttaacatttatctttgcttcctatatatcattatgccttgcatatgaatttggcatttaatatttatccaaaacataatttttaaaggttgttcatatagaaacttaaaaattataaattatttcttcaataaaatgttttagacatatctcactcaaaattgagagagaatttctttcattttagttagttcacaagacttcagattagaggaaaaaattataataaatgttaggatattattttcacacctttaaatattactctgattataagtaaatgctgtgtgttaaattgtaataaaacaagtaaaaggaagattggaatacttgtgtatgaatttggttaaaaacaaaaaatacctcgaacaatgaaaaaacacaactgattgctggacaggagtggcaaacagggttgatgcatttttacattgagacatcattttcaaccgtgaaatccatttataactagaaacagattgtaaggattaggaaagatgaataaagtattttaaatactgagagtattaaataaactagaaataacatttgtagtcaagaggaagtgtgtatttagttgtccttcagtgtttatgacagattctgttttatttttagctcctgtttggtattagattgactgttacagatttgaaagcatataaaatgaaacatgcatgctgtttttcctctgattttctagtttattttaaataccacaaatataattacaacctgaagatgaatactattttgtataagctgatctggtaggtcaaatatgcacccagcattcctggctagttatgaatatcttctaggcaggcttaatttattggctggcaacattaccaactgcctaagaaacaggtagatcctgtacagaataacagaaggagttgagagaggattgagagggtccttactagcattgtaagcttttaatgacaaatttagaaaacaggcagtaaagcaatagaaagtcatagaagattaagagctttgcagaccagatattaaattggtcttgtaggagttaggccttgaaagagagatttaattgttttatttgtttttttcagctgatgtagtaatctaagcaaggtggtttaaaagttgctctttgtgatggcatgaacagcttttgaaattattataatttaagtattcaacgagtttctgaaattgcattttgttttcttgaagatttttacagaaatatattcagaaagaaacagaatgtctgagaatagcaaaaccaaatgtatcagcctcaacacaagcctccaggcagaaaaagatgcaggaaatcagtagtttggtcaaatacttcatcaaatgtgcaaacagaagtaagtgatgttataaattataaataaatggcttaacagattactgtcgcgtgagttttttttttttttcagatcattttaaggacttaactgttgcataagtttgttctaaatagaataagataaaagttgagtgtaagtacatataatgatttttatttttattaaaaggtttttttttagggctagtcaagtgaagcagtgggagtttagaaggaacaaagaaatctgtaactggttgtgatcaattcgttgtaaacaccactgcactcaggccagcctgatttttaatattacaagttcaaatatttggggaaatttatgcaagcatagaatgacagaaatctgaggattgaagggatttatttatttaagagatagggtgtcactctgtcacccaggctggagtgcaatggtgtgatgatagctcactgcaggctgaagcttctctgttcctaagtgatcctcctgtcttggcttcctagtagctaggactacagaagtgcatcaccatgccaggctgatttttttttttttttttaagaggtgttatttcactgttctgcccaggctgatcttgaactcctggcctcaagcagtcctccccctgctcagcctccctagttattggtattacagatgtgagccaccatgcccagtgaaggaattaaaaattactgtttaaactacccagtcttggatgccctctctacgtccctagcctttaggtagaagtgcagtcttcatgattgaatatactttcaaggctttcttttccatctttgaatagcattaacagtattaaaaactggccaggcgcagtggctcattcctgtaatcccagcactttgggaggccaaggcaggcagatcacctgaggtcaggagatcgagaccagcctgaccaacatggcaaaaccccgtctctactaaaaatacaaaaattaattgggcattgtggcgcacgcttgtaattccagctacttgggaggctgaggcactagaattgcttgaacccaggaggcagaggttgtggtgagctgagattacgccactacactccatcctgggcgacagagcgagactgtcaaaaaaagaaaagtattaaaaacctgtcttttgttactgcttctcccttctgagagtatatcaaaaactcctatttatgtttttagtgtgacatccttagagatgtttgaaagtagccacaatatttcctaagtcctcatctctaaagttcataatctcactttcttcagctcacgtgacctaggttttatgctactctcctctgaatattcttcactttaattgtctgtcttaaagtgtgggcctctacttacagggaagaggccagaaaaacaaacaaaaaagtgtgggactcattttttttaatacaggctcttgctctgtagcccaggctggagtgcatgcagtggtgcaatcttggctcactgcagcctccgcctcccaggctcaggtgatcctcctgcctcagcctcccaagtagctgggactataggcatgggccaccatgtctggctaatttttgtatttttaatagagacagggtttcactgtgttggccaggctagtctcaaactcctgacctcaagtgattttcccgccttggcctcctgaaatgctgggattacaagcgtgagccactgcacctggccaggactcaatcttttaggtatattctgattagtacagagtgaagcaattcttgcttatctttcattctgtactcttactgattaattctaagatcatgtgagcttccttggctgtcagaaccaacacttaactgacattttacttgctatgatttgaggaaaaaaacaacccccaaaaatatttttttctcctgatgagccaaatagttcccatctttaacttgtacaattaatattgtgaagagttgatttttcggaaccaaaatgcaggatcctggcaagcttttgtaaggaaatgggctttacacatactgaaaagctagaggcagaagtgtgtgttcagggactcctgggctcttcacagataaggatgttgctttgtgataccaactcttaatttaagaatcaggagtgtgaggcgcggttgctcacacctgtaatcccagcactttgggaagctgaggcgggcagatcacctgaggtcaggagttcgagaccagcctggccaatatagcgaaaccccatctctactaaaagtacaaaaaatagctgggtgtggtggcgggtgcctgtaatcccagcttctcgagaagctgaggcaggagaattgcttgaacctggaaggtggaggttgcagtgagctgagattgtgccattgcactccagcctgggcaacaagagtgaaactctgtctcaaaaaaaaaaaaaaaaaaaaaaagaatcaggaaagcccccaaattggtaaatatttagtagaagtatgcagattattagtgaatatttcagattggtggtatgagacttgagtccaaagaataatggtttagtcaattttctacctcctctgagatgcgagttcgtgtggatagcttcaaccccttgtcagagactccagcagagacaaaggaaaactacaccaaaatattctgcactcacttttgctctgtgtagtagctttgtatccagtaaaatattttatttgctaataatgctgggatatagtaggtacttactgaaagagtgaatgagagaaagataacatgtcaattttgtagcccaccagaaaagtttgcaatgtgtacagtagttttgccttgcagtgaacaaaccttttaattgcaacattaacaatggagattacgtttgaaaatgcatcagcctgttggtttataagaaatagttggtgaaattatcaatgctggtcatgtaagtagttgaaaatttgtttttttatttacggcttccttttctttcaaatttgactttgttacttaaacctttttaatattggggcaaaaccagggagttactattccctcaccccacttcagttgtttttgtttgtttgtttgtttgttttttacgaaaagattggagggttgatggaaatttaacatatgtctaaactttgccattcttgcttagcattggtatccaaggtatgatgaaagaaatagagattagtaaaaaagaagtaaaaggcagctgagaagaaacaagtaagcaaatattgttgatttctctccttttttttttttttttttttttttttttttgagacagagtcttgctttgttgcctaagctggagtgcagtggtgcagtcttggctcactgcagcctcttcttcctgggcgcaagcgattctcacgtgtcagcctctagagtagctgggactataggcacacgccgccaggcccggttaatttttgtatttttagtagagacgagggttttgccatgttggccaggctggtctcaaactcctggcctcaagtgatctgcctgcctctgccttccaatatgctgggattataggtgtgagccaccacactcacacacccagcctactgttcatttcttttctttttttttttttgagacagagttttgctcttgttgctcaggctagagtgcaatggcgccatcttggctcactgcaacctccgcctcccgggctcaagcgattctcccgcctcagcttcccaagtaactgggattacaggcatgccccaccatgcccagctaattttgtatttttagtagagacggggtttcaccacattggtcaggcttgtctcgaactcctgacctcaagtgatccacctgccttgtcatcccaaactgctgggtttataggcgtgagccactgtgcccaccctgttcatttctttatgttagcatttgtctgcttttgtacaaagcttaaatagagtctagatagtgcaaaactcagctgcgaaaaatgttaagttccataagattcctgaaagtctctgtaagtaggctgggcacagtggctcatgcctctctaatcctagtactttgtgaggccaaggcaggcagattgcttgagcacaggattttgagaccagcctgggtaacatggtgagacctcatctctacaaaaacacaaaaattagccaggtgtggtggtgaccacctgtagtcccagctacttaggaggcttagggaggaagattgcttgagcccagggggcagtggttgcagtgagccacgatcatgctattgcactccagtctgggtgacagagtgagatcctgtgtccaaaaaaaaaaaaaaaaaaaaagtctctgcaggcaacttagttgtacttttaagaaagatttgatcccagaagtttgagaccaacctgggcaacatagggagaccccatctttaaaaaaactaaaaaaattagctgagtgtagtggtgcttgcctgtagtcctagctacctgggaggctgacatgggtagatcccttaagtccaggaggtcaaggctgcagtgagtcataatggggccactgcactccagcttgggtgacagagcgagatattctgtctcaaaaacaagcaaaactatgaaaaaaaagtcaacatttcttgaaatacttctcatatttggtagaggagggagatatattgggataaaggacataggaagataggattttattataatattaatttctgtagttattcaacacaaattaatttttattgagcatttgctattagggcagtcactgggcttttacgtcagaatatagagattaattcctttccttaaggatctaatcatacaatggatgttttagattagaaaaatgttacaaggactataagagaaatgcacagggtactagaaaaaaggatcacatggttgtgcatttcataactggacaatgcctaaaattatgaagtgagccataagtgaagatgattttgcagttatatcagtgtatatttgtttaccatagcctgtgaatataactagtttcatcataggaaaaccctaatccagaatatattcatatttacatgagttgtgttctgctcatagttatggcaataaatatattcaattttaagattgtcagtatggaaaaatggcatttctgctgtgacgtaaatataatttactgaaaatgataattaaattatttttaaatgtaattttgttaccttcaagaatatgtgtgtagtcatgccaagttttcagaatctctagtaagtaaataacatgctgttaaaaatgacacaggtacaggggtcaagcacagtggctcatacctatagtctcagcactttgggaggccaagacaggagaatcccttgagctcaggagttcaagaccagcctggggaacattgtgagagattctgtctctatgaaaaatttaaaaaattagctgggcatggtggcacaacatctatagtcccagttgctcaggaggctaaggtgggaggatcccttgagcctgagaggttgaggctgctgttgggtgtgatcatgccactgcacaccagcctgggtgatagagcgagaccctgtcttaaaaaaaaaaattacaacctgaggtgtttgtatgccataaatgctattataggacttagaactaattttgctttccaaggtaaatattctccttgtaatcttatgttattctaataaattcattcttcataaagagtgccaaaaaacttgggatcatttttggtctaacaccagaaattgtgaattattaaggttataattgtttaagaatgattgcttttcgagatgagcagatcacttgaggtcaggagttcaagaccagcctggtcaacatggtgaaaccctgtctctactaaaagtagaaaaattagcagggtgtggtggtgcacgcctctagtctcagctacttggaggctgaggtgggagaattacttgaacccaggaggtggaggctgcagtgtgctgagtttgtgccactgcactccagcctgggtgacagaccaagattccatctcaaaaaaaaaaaaaaaagaatgattgtttttgctatatattcctataaaagaggcgttggcaaacttactgtgtaaagaggccagatagtaaatgttcttgactttataggccatgtggtcacctctgtcttaattacaaaagcagccataaacaataagtaaatgaatggttgtgactatgttccaataaaatgttatttgcaaagaaaaaaaaaatgaattttgcttggggccataatttgccaatttcttctctacaaaagaagtttagttaatagtaatttcccaaatggaattatttaaatagttgccattccaagtgtcttatttttgttcaaatttatgtttttctttatttgtttattttgaaataggagcacctaggctaaaatgtcaagaactcttaaattatatcatggatacagtgaaagattcatctaatggtgctatttacggagctgattgtagcaacatactactcaaagacattctttctgtgagaaaatactggtgtgaaatatctcagcaacagtggttaggtatgttttgaaggttgttgtttgtgaatttttcctcatgaaatgaaacttcaccaaagaaagcactctgtctgtatctgtctatatcccccaagtgacctgacagtttaacagtactttagtaaaattatatggttatcgaactgacccttaatttttatttattatgtagcttttgaataaagtcatgaataatatatcaggtgcctgatatcagagccggaattacagttgaaaaataccatctccatcgtcaaggagttgacagtggcagaagaaaacccaagtaaaccagagttcataatgtgctgtgatacagacatatttgggttcagtaggtatacaaaacaatgacacctaaactcaaccatgatttaagtagaaagggagaaaaccaagagagggaagtaccataaaagtgaaagcaggcagggtgcagtggctcacgcctgtaatcctagcactttgggaggccaaggccggtggattgcttgagctcaggagttcaagaccagcctgggcaacatggtgaaactctgtctttaaaaaaatagcggaggtaatggctcttgcttgtagtcccagttacttgggaggctgaggcaggaggatcacctgagccctggaggttaaggctgcagtgagctgtgatcacactgcactccggcctccatgacagagtgagaccctgtttccatttaaaaaaaaaaaaaaaagtgaaagcaagagagttgaaagttcaaaggggcgtggccaacattttaagtgttgtagaaaggataagacacaaaagtatccattggatgaggcagttagcacgctacttctaaggtaatggaaatcaaatatattagaatagaatgcattagaagacaatgtacagaacccagtgattcattagatgtgtagagtgtgtgctagggaggaatctggtgttgtttcctgtttatagctgggaggtactgagagaccacaaaggaaggaagttatggtcagagattgaaatacttcagtttgttggtttcaaagatggagcatttctgggtttgagaataagtgaaagtaggatttgacattaacaagatgattttaagtcaggtgtcaaagtcttctaatacacgaactctaaaagtttagaagcttttttttttcatggaaagtatttaagctaaattttgctagctaaattaaaagacatttgtccatattctttattgccattttattatttcaaaatgagatacatgtgaaccacaaaactactacctaatcagtaccctcactcctgcattacactctactgttcccctgagaataaatgccttctcagctaatttcttaggagtcatttgtagcctttacgttactctgaacacaagataggctgtgtctgtaacagggccctcaacaagcctagagacagcctttgggaataggctggtgatatctaggttacctaaccagatctttccccagtatggctggtcatatttaggtcattttacattatcacttacaaccatggctgtcactgaaacaaaggcagtctttcccctagtctgcttactatattctgtcatctagtttgttctctgaaaccccctttttatttttaaactaactactcttacttctttttttttcttttttctttttatttaagctaacctttgccacttcttcccggatgttacttcttataattagcttttttgtcaaagtatttttttacttagcttccttttaaaacttgcttagatgaggactctgtggaagaagcgaagtctgtgctcaaaatatatatttggtacaggtggtgactgaagccatgactatggatgagatttgtatatagagtttagtgtgagatgagaagaatggcctaagattgagtcagcatttgcatataaattttggaatcagcttactgatttctacaaaagatcttgctgggattttgatactaattgcattgaatctgttgcacaatttgagaagaatagaaatcttaacaatgtggagttttccaatccatgaacactgtatatctctccatttacttaggtttttttttttttttttttttttttgcttctttgtttgtttttttgagacagagtctccctctgttgcccaggctggagtgcagtggcacgatctcacctcactgcaacctccacctcctaggttcaagcgattctcctgcctcagcctcctgagtagctgggattacaggcatgtgccaccacacccagctaatttttgtatttttagtagagacagggtttcctcatgttggccaggctggtctcgaattcctgacctcaggtgatccacctgcctcagcctcccaaagtgctgggtttatagacttgagccaccgcgtctggccacttgtcttttttgatttctttcattagtgttttataattgtcagcatatagattttttgttgtaaattgacaattttttttctttaattttatatattaaaaaaaatagagacaggatctcactgtgttgcctaggctggtctcaaactcctgggctcaagtgatacccttcccttgacctcccaaagtgttgggattataggcatgagccaacatgcccagctgcaaattgacatttatttataattgtataaacataaagattttgtatatgttttgttagatttatactgcagtagtttgtaattgcattgtttttaacattttgattttcaaattgttcaatgcacaaaaattatacagaagtccagttaatttttgtatagtgaccttgtattttgggaccttgctaaaatcacttactaaatctagtagctttctttgaatgttcttttggattttctttgtagacaaacatgtcttctgtaagcagtaatttttttttctttctttctgagccatgtggcttttattttatttttgtgctttattacattggctaggacctccagtgtgatttattgtggtaaaatatatataacatttataattttaacttttttaagtgtacagttgtgtagtattaagtgcattcatattgttgtgtaatcatctccaccatccatctccagaacttttttttctatactcagtaaacaatgatttaccattttcccctcccctatcccctggcagctaccattctactttctctctctatgaatttggctatttggggtacttcatttttatggattgaatgttgtgtcccaccaattatgttgaaatctaactcccaaagggatggtatttggaggtgtgggatttaggaggtaattaggtcctgtgggtccagccttcatggatgggattaatgcccttatgaaaagaggccagagagctaacttgctgtctttctgccatgtgaagatacagttcaaagtcagtagtctgcagccccaaagagggccctcaccagaaacccacaatgctggcacctgagctgctttcagcctccaaaattgagagaaataaatttctgtggtttctaagccacctaacctataatactttgttatagcagcctgaagtagaggactcctataagtatttgtccttttgcaacctgcttattacacttaccaaaatgtctttgaggctcatcagtgttacagcttttgtcagaatttcacccttattaaaaactgaacactattctgttctgtgtatatgccacattttgttaattcattcgtccattggtggacatgggttgtttctaccttctgattattgtgaataatgctgccgtgaacatgagtatacatctcctgagtttcctgctttcagtcttttgattatatacccagaagtagaattgctagatcatgtggtaattctatatttaattttttaaggaaccaacatcctgttttacacaggagctacgccattttacattctcaccagcagcccacaagggttccagtttctctacattctcactagcacaactaatagaaaatgaggattcctcttctaggccttgaaagtgctgcataattttgcttcttcctacctgtctaacttaactaaagcgcttctaatttctgtgctcaagctacactgtcaattattcagtttctcaaacctagtggtttccatttttttaaattgacttttatcttttagaggaattttaaatttacagcaaaacggagtggaaagtccactggacacacacagcatgccctactgtcaacatcttgcaccagtggtacatttgttaccatcagtaaacctatgctgggacacatcattattatccagagtccaaggttcacttttggtggtacatatgctatggattttgacaagtgttttgacatttttaaagatctttttctgtatctaatgagatggtcatatttttttttcctctgggagagaatggtaacaatttttcactattacagaatcatacagaatactttcactgtcagaaaaatcctctgtgcttcaccttttcatctcttccttcttgtaaactgtgggaaccatggatctttttgctatctccatggtttagccttttccagcatgtcatatacagttgtgcgtctcttaacaatgtggatatgttctgagaaatacatcattaggcaatttctttgttgcgtgaacgtcatagggtgtatttatacaaacttagatggtataacactacgcacctaagctatatggtattactgctcctgcactacaaacctgtgcagcatgttactatactgaatactgtaggcagctgtaacacaatggcaagtatttgtgtctctaaacatatataaacatagaggaggtacagtaaaagtatagtataaaggataaaacatggtacacctgtctagggcacttaaccatgaatggagcttgcaggactggaagttgctctgggtatgtaaatgtgtggtaatgtaaaggcctgggatactatatactactgtagaatttgtaaactcttattctgtaccaaatttaaaaatttatgtttttctttcttcaatactaaagtaacattagctactataacttttttactttataaactttaaaaatgtttaaactttttgactcttttgtaataacacttagcttaaaatacaaatgcattgtacagctgtacaaaaatattttttccttatatacttatagatgttttttcttttgttctataagctttttaaatgaaattattattactctattttttcctttaaacttttttgttgaaaacaaagacacaaacacacacatgagcttaggcctacataaggtcaggatcatcagtatcactgtcttctgtccctgcatcttgtccccctgggagatcttcagggacatgcacagagctttcatctcctatgataatggtgctttattctgaaatacctcctaaaggacctacctgagactgttttactgttttgttttgttttgttttttaagaagaagaaggaggaatatagtataaaatggtgataaaaagcatagtagagtaagtacataaacctaacattttaccagtaacttagtcatttattatcattatcaaggtttatgtactatacatgattgtatgtattatacttttatatgactggcagtgcagtgggttttttttacacaagtatcaccacaaatgcttgtgagtaatttcttgtgctatgacatcactaagtatttaaataggaatttttcagttctgatacaatcttacggtaccaccttttcatattgccatttgtcattgaatagaatgttgttatgtagtatgtgactgtggttggaatcataacagtatgtatcattttcagattgccttctttcatttagtaatatgcatttaaggttcctccatgtctttctctttctttctttctgtctttctttctttctttttttttttttttttttttttttgagatagggcctcactctgtcacccaggctggagtgtggtggtgagatcatggctctgcagcttcgacctcctgagctcaaatgatcctcccacccccttccaagtagctgtgaccacagacacaagccatcacaccctgctaatttttcatttttagtagagataaggtcttattatgttgcttatgccagcagcttgaactcagcctcccaaagtgttgggattacaggtgtgaaccaccgttctcagctcctcgatgtctttttatggcttgataggctgaagtgggaggatcacttgagcccaggagtccaaatctagcctgggcagtgtagtgagacttccgtctcttaaaaaaacaaaaaacaaaaaaaagaggaccaaagttactgatattagaaatgaaatgagatctaattgcagatcctatagatattcaaaggataataaggaaacactatgaacatctattaatttaaatgggccagttcctcaaaaccatacattatcaaaagtcatccaatataaaatagataatttgactagtcccataactattaggagaataaattgaatccataatttaaagcctttcataagacaaattgggaacaagataaggatgtgcactctcaccactccttttcaacattatgttggaggttctagccagggtagttagacaagaaaaataaaaggcatacagattggaaaggaagaaataacactcccctttgtagatgacatgattgtctatatataaagtcccaatatacacaagtataacattgtgaataatgttatttggggactgggcacagtggcttacacctgtcatctcagcactttcggaggctgaggcaggtggatcatctaaggtcagatgatggcttcctctaaaacaggacagatttacttgtagcctattgattataaaaagcttgaggtttctctgttataactcagtccactgttttcgcagtgtcaagtgtcccatttcaccttgcctttggtactggggaactgatgcaaaaatgaaggtagtctggctaccatcattactgggagaaataaactgtcctttttctcttatcaggaatctcaggtttcctgctagcacccaggaaactgtcatgctaatttgttaggttacaagtagataaaatctcagccaggcacagtggcttatgcgtgtaatcctagcactttgggaggccaaagcaggtggatcacttgagcccaggagttcaagaccagcctgggcaacatggtgaaatcctgtctctacctaaaataccaatcagttgggtgtggtggtgtgggcctctagacccagctacttgggaggctaaggtgggaggattacctgagtctgctgagattgaagctacagtgagccgtgatcttaccaccacacaccagtttgggtgacagagtaagactctacctcaaataaataagaaacaaaccaagcagagtaaaatttcatacccttcataggtctcaacacattttttgcatattattaatcaaacagtattattattttaaaaaactgtggaggccaggcccagtggctcatgcccataatcccagcactttgggagaccaaggtgggtagatcacttgaggccaggagtttgagaccagcctgaccaacacggtgaaaccccatctttactaacagtacaaaaattagccaggcatggttttgtgcgcctgtggtcccagctacttgggagactgaggcatgagaatcacttgaacccaggaggcagaggttgcagtgagccaagattgcaccattgcactccagcctggacgacagagcaagattctgtctcaaaaaacagaagaaagaaaaacccatggagcatgtactgtaagtgctttcttaggcctagatgatggaacagaggcttagagaagttaagtaatgtttctgcgacctggctcttaaactggtgctctcacagcagtttatagttattcctgtcttaaaggcattttatataagataaaattaaatactgatggagtacttttactatgttaaaaataaattagtgcagttttaaaatcctttttctgtatgggattatggaatatttaagttaaattgtaacatttaatacattttgatttttaaaaaatcatgactaataatttttttttttttttaagaattgttctctgtgtacttcaggctctatctgaaaccttcacaagatgttcatagagttttagtggctagaataattcatgctgttaccaaaggatgctgttctcagactgacggattaaattccaaatttttggactttttttccaaggctattcagtgtgcgaggtaatctaatctctttttcttttgttttgtattgaaatacttttgatcttgcaagaccatgttttagactcagtaactaaaaattctaccttaaaataaaacattgatccatcataacagaactagtggattcctaaagagacaaccaagtccaacactttctgaatatccaatatgcagaacactacgtgaagttttcaagggggagatgtgtcttgctgatgttctgttgaccaggaaagttaaatatcctctaagtcattgcatttcccccattttgaggatggttttaatataccgagaataaaataaaataggaaaatattttggaagtattactgttgtacattagtatggcagtactcaatgtataatgtgaaacattttataaatggtgttacaaatcagttttgtttatttttatacaatgttttagcaggagggagagctaacagaagtggtctcttaacaccaaataagaactaattttttgtcagtgtgaagtaatgctgtgatttttttttttaatgaatagttttgaaattaagactactgtttgaaaattagggttttgtttttttttctttcagcataccacttcataactgttcagtttgtacagtttgttccccctgttatacccagttgagcttgtttgtttcttcacagacaagaaaagagctcttcaggtctaaatcatatcttagcagctcttactatcttcctcaagactttggctgtcaactttcgaattcgagtgtgtgaattaggagatgaaattcttcccactttgctttatatttggactcaacataggcttaatgattctttaaaagaagtcattattgaattatttcaactgcaaatttatatccatcatccgaaaggagccaaaacccaagaaaaaggtataaaggaaatgtttactgttttgaatttgcttcttcattcaaacatagaagtctaagtataaaattagtgttctttaggaggatatgactttcctctggatttctctggttgataatgttacttagccatgagaatgtttttcatagagtttttagaatttgaagcagtggtagcagattctgttatgcctttctatttgttcaatacaatattaggtattatgggaaatacaaaaaaatctgagacattgttccctctaggagctacttatgcatcaatacttagatactaaggggtctgacacagactgtagggcaaaagaatttaaagaaagcaggatcttgtttatccacctattacttttattagaagataaaatacgtaaattggactaaaaccagtcagattattcagctcctgaggaagatacatacatattactttaataggaatttgaggcagaaacagggaaattgctgccttaagcctcatagttactctagggccctgtttgccctagagtatcacttgttaaggagaatcacttattctccttaattccttcatatatgtcctataccaagagagtattgcccagaaggtatagtgcttttctgtagttaggaactttattggctggaactggagtttcctcttgctctgtctatgattgcctttgggcttatactagcctttggaccaactcatcatggctagtatagtgactttcttaaaacagcataccacattgagtaatagcagctataatggaggaaatgtcttgtagccactttttttttttttttttttttgagacagagtctcactctgtcgcccaggctgaagtgcagtgacgcaatgttagctcactgcaacctccgcctcctgggttcaagcaattctcctgcctcagcgttctgattagctgggattacagatgcctggcaccatgcccagctaatttttgtattttaatagggatggggtctcaccatgttggccaagctggccttgagctcctgacctcaaaccatccacccgcctcagcctcccaaagtgctgagattacaggcatgagccactgtgcccggccgtgtagccactttttatcaaaagtagctgtgtatttgttttatgggctcttctaataagtatatctagataatatgtagcccatgaaactactataagtgaaagaatagtgacttttaatagtttttcatcttttactcacctcttatctccaggatgaagatcaggcttattaggaggtgatatgatatgtttagggatttagttaactgcatatttagggtgaatttaaaattggcaggatgatgaggatgccagaaaagctaatgtagtttcagactactttaatagattttgtagtaccttgtttgtgagaaataatagaccttttgtttcgcatactagtcaagccacagttggattaccatgttcaccagattttgtatagtcagcattttaagttgactggaatgtgtcttgggaaagatgactgaaatggtgagaagtctgaataatatgtcatttttacactagttgaaggaactcgtaatatttttctcttaggccagaaaaaggcatacggagaacttggtcctcatatgaaagagggaacatattaattgtatttgcctcaggtgggagaataaattggagaaagacagattttaggtcagaatatggaagaaatttataagaaacacagttatctaaatgtaaaatggacagttatgaaatagagtttgtcaaggatcttgtcagaagaggcattagtactgaatggaaggttggaccaggtgtcttctaacgctgatgcagcttgacagctgaataattttgtgggagctagcagtgtaaacagagtacatacataaaaattacattttaattttttggattacaggtgcttatgaatcaacaaaatggagaagtattttatacaacttatatgatctgctagtgaatgagataagtcatataggaagtagaggaaagtattcttcaggatttcgtaatattgccgtcaaagaaaatttgattgaattgatggcagatatctgtcaccaggtacagtaagtaggtcatgtcacatttagaaatttcctgttaattttttttttaaactgggcattttgggcttttaaaacctgtgttctcacaaaaagcctataaaatgactctgtacatgcaactattcctttcaaactatcagaaatatttggaattacccttttaacttaaaagttaatgcttttgcagatatttgaaaactaacaatgaactttttcattcttaaatgattgtctctaggaaataaggtgaccctaaccctaatgattcgattcgactcgactgtattctacaaagtgctgggattacaggcatgagccaccaagcccagtctgtttcttttttgcaattaagctagagttcacatagcataaaattcacgattttgagttgtacatttcagtggtttttagtatttttactatgttgtacaaccatcatcactaattctggaaactttttttattttatttttatttttttgagatggagtcttgctctgtcacccaggctggagtgcagtggcacaatctccgctcactgcaacctccctttcccgggttcaagtgattctcctgcatcagcctcccgagtagctgggactacaggtgcctgccaccacgcccagctaatttttgtttttttagtagagactgggtttcaccatattggccagcctagtctcagactcctgaccttgtgatcctcctgcatcggcctcccatagtgctgggattacaggcgtgagccaccgtgcccagcccagaacttttttatcatcccaaaagaaacctcatcccttcttagcattcagtcccaattccctgcatctcctagatcctggcaaccagccactaatcaatcttggtttttgtggattttcctgtttgggacagttcgtttaaatggaatcatacaatatgtgagtcttttgtgtctggtttctttcactaagcataatgttttcaaagttcatgttttaccatgaatcagtacttcattcatttttattgctgaataatattcagttgtatggatatactccattttacttacccatccatcacctgatggcctaatgtttcttaaataaaactctgttccccagagatttggttaacatcctgagtagtaatttcactctgtcaaatattttcttaatatttcttaaaatttcttaaatttaaaaacttgaatccctttgaaagtaaaggtttttgctttacttttagatttcttagtgcttttagtaaatgttcccaggaaataaaactaatgcattacttggtaatacctgctttctaaagtgccattactgtcatgcaaaatgtttgtttcttactatgttatcagatttatatgtttctgtaatgtattactcttgctttatgagttccctgtatcttcatttcagaaagaattttttttccccctaatgaaatattagaagacaatagcaatgaaaaaagtgtatttggccaggcgtggtggctcacacctgtaatcccagcactttgggaggccaaggcgggcagatcacctgaggttgggagttcaagaccagtctgaccaacatggagaaactctgtccctactaaaaatacaaagttagctgggcatggtggtgcaagcctgtaatcccagctactcgggaggctgaggcaggagaatcacttgaacctgggaggtagaggttgtggtgatacgagatcgtgctgttccactccaacctgggcaacaacagcgaaactctggctcaaaaaaaaaaaaaagaaaaaagtggatttatttttattttacaggtttttaatgaagataccagatccttggagatttctcaatcttacactactacacaaagagaatctagtgattacagtgtcccttgcaaaaggaagaaaatagaactaggctgggaagtaataaaagatcaccttcagaagtcacagaatgattttgatcttgtgccttggtaaagtgttaccattttctcattcagtgtcattttaatctcttgtatgttatttttcagaaaactttcagtggaatcctttcatctcaaccagaactaagtcatttgtctacccccaaacctattactagcaaagggatatgtgattgccatgacaaatgagatcaatcattaatggctcatttgcttgggccaagtgcagggccacctattttaatcatattgtcatagcaagttaagaaggaggactggctctctgataggcaattagaagtgtgcacctcatggaattcactgaattgtacgcttcaacaatagattttagcatacgtagcaccttctaatagaattaggaagaagttaaagataatcttaagaaatcacagaataattttgaccttatgccatgataaaaagttattttctcttattttctatcttctttattctcatgtaacgttcacatatatttaagtaatcaaataaattatggatactttggaatcccaaaatattagatctggtaaggatgtttagaatttatctagttcagcctgtttgctttactgaaaagaaactgaaacccagagaggttaagcaacttctgtagggacagagatttatagattatagtcaaactcgtgatcagtgctcttttgattaccatgttgatggaatgtttaagtgtaagtgacttctggggaaaagcatattgatttagatacctattgcttaagctcatttttatatagttaagagtagctatttaagattcttaatttgtccttttagtcaagagtaatttattgaacacctgttatgggctaagcgttagatatacagagatgaataacataagactcctattcttaagtatcacacattctagagaatacacagcaaatgtttattggattaactgaattaatgtaaaggaaaaacagttttttgggtttctttgttttcctgttttagaggaatcgtttggtgactaaagagcaaggatgtacaagataactcagaaataaaatattgctaaatatatatatatatatatatatattttctgagacggaggctcactctgtcacccaggctggagtgcagtggcacaatcttggctcactacaacctccacctcccaggttcaagcagttatcctgcctcagcgtcctgagtagctgggattccaggcatgtgccaccatgcccggctaatttttgtatttttagtagagactgggtttcaccatgttggccaggctggtctcaaactcctaacctcgtgatctgcctgccttggcctcccaaagtgctgggaaaccacctggcccaaatattgctaatttaatatcctttaaaatatttgtttaagggaaacttaacagcttacccagctagccaaacgttgacaattttcctgccaatttaggaagtaggacatagtaactattaacagccagtttatttttagagtactatggaaatgatggtgattctctaattaggatattgtaagagtaccatgtctatatatttccttttagtttgttaatgtgatggaatagttttcaaattatcctttttttttttttttaggctacagattgcaacccaattaatatcaaagtatcctgcaagtttacctaactgtgagctgtctccattactgatgatactatctcagcttctaccccaacagcgacatggggaacgtacaccatatgtgttacgatgccttacggaagttgcattgtgtcaagacaagaggtcaaacctagaaagctcacaaaagtcagatttattaaaactctggaataaaatttggtgtattacctttcgtggtataagttctgagcaaatacaagctgaaaactttggcttacttggagccataattcagggtagtttagttgaggttgacagagaattctggaagttatttactgggtcagcctgcagaccttcatggtaagttcagcatgcattatgtctgacttacagataaacacacacagacacacacacactcacatatccctgatcattttcatagtttgttacttcagttaaagatgtcaaattctatttcagatgcttttcttgtttggccgagaagacttaataaatgcataagtgaatttagtttcaaatgttgacaaattattaaagactaatgttaaggaatttcttttttagttaaaaaatttttaattgatctataatagagttatatattatcaaggtacatgtgataatttgacacactcatatgacacactcatgtagggtgatgggatatcagcaccctacgtatcttttcttcatgctaggaacgtttgaattattctcttcttgctgtttggaaatgtacaatagattaatgttaaccgtagtcaccctactgatgtatcggacaccaggtcttattccttctaattgtatacgtgtatccaaaagactttctttaaagaattatgaagagtttaaatttcttttatgtgcaatttatcattatttattaaatagccatgtttaaattgtagtactatgcactgttaataaacgagctattttttaatcaagaatcttcccaaatgtaatcagacttttaacagtttttatgttcatttagtcaccttaactaaatgtatgtgccaggcactgtcctgatagataaagtctttgcccctccaatagcttgcttttcacaattgtcctttgttttgttatagtcctgcagtatgctgtttgactttggcactgaccaccagtatagttccaggaacggtaaaaatgggaatagagcaaaatatgtgtgaagtaaatagaagcttttctttaaaggaatcaataatgaaatggctcttattctatcagttagagggtgacttagaaaatagcacagaagtgcctccaattcttcacaggtaatttaagttcattagcatgctgctgttttttttgtttgttttatcaggctctctccacttatttgatgccagatggctttattttataataataatgcagaatttcccagatctaaccttaattattaaatattatgtttgtttttacagttatctgtgtctttatgcctgattgcttctgaaataaagggttgtctcactgtgagaatatgggggatgtgcatgaaaaatgcacatataattctttgagcatttatgtgttcctttctgattttttaaataagtaagtccatatatttgagtcatgtagatcctggatcctttctcataatgggagtgtcttttgggtaaaagatgttttatgaatgaggtgaggaaacgaggaagacaaaacaggatgtaagcactaggataaaggaatggagtccctcgtccacttaacctttccacagattggtaattggaaccaaatgattggagagcagacctccgaatggatccaattaaagtacttttgctttaattttacaaccttttatttatttcagaaataatgttaaacatgctgtttctaaacagtattggaaatgataataacaatggttgtcctccttaaattgtccttttagatattaagaaatttagtatagatgaaagcaattttaatctaggatccaaattttagaagtcaagatttatagctaaacatggatgttaaagtttaaagtattctttacatggcttttggtcttctaagtgaagctttttgtttttctttgtagtaattttcctcatcttgtactggagaaaattcttgtgagtctcactatgaaaaactgtaaagctgcaatgaattttttccaaagcgtgccagaatggtatgttatctaataatgctctttatcattttaagctatagctttaattacaaagatgataattttagctgggtagtagctgcatcttaataattgtaaactaaattggtccaaaaaaattgcaactgttagccagggaagaggttgttttaattcagtgattgtaatctatgttatataacattagaccaagcttactattttttaatgctgtatagtataatatgtgacaagtgccaatgagaaaaactgaatggttatgctgggaaattaagaatataaaatttatatgaaataagttcttaaagatgttacccatttctgtacatcaactatgatttgactatttgttagctttaaaaactaatgataattgaaaacaaaaataaatctaaacctgagtttagttgattgactcaagagacttagattgtattgctgtgactgaaaatgactcactggcacaaacattccttatctccctcaagagggcaaaaggatgcgtaactgcttacctataccagatgttaaaggtttttaaacctatgctctttacttcctctgcttggtgaaaaaagggatatgtttgcagacaatgttatgcttaacatttatatctggtgtttttaaaaatactttctgaatttgcctttgagattgtaacttgtattttttctctatctattagtaaaatttgctactgaataatgacatttgatataagtaggtctcaaagtccgaagaagagaagcatttaaaagaataatctattaattatataagtagtctttgaatgatgtagatactaggttaatgttttcctttgtaatatattgctaatacatataaggcaaagcattaggtacttggtttatatattaaagatcttactttcttgaagtgaacaccaccaaaaagataaagaagaactttcattctcagaagtagaagaactatttcttcagacaacttttgacaagatggactttttaaccattgtgagagaatgtggtatagaaaagcaccagtccagtattggcttctctgtccaccagaatctcaaggaatcactggatcgctgtcttctgggattatcagaacagcttctgaataattactcatctgaggtgagattttttaaaaaaagaactaagcttatatatgattcaactttggtaaactgttaggaaggagaaataggggcaggaaaaacagcaaggatggtgggaggcttcattttaaaagcaaagtggcagtaaagggctctaaattggacaacttagcataattaaaggaaaactcaagaataataatttgagtacttcctttgtactggaaattatggtagacataaaataattccttgtgtaggttagtgaggaatagtaagagtttgagcatagggattatatgatgaaaaaaacctctaaatacaaaggagggaaatgttacagtaatagaaaagaacacgatgtaaacaaatctaatagattttggtggcatctgaagagagatgagtgattagtaaagacaataaatggactagcaattattttagacgtcatctaggaatttcctttagcctcaaaatcacgagttctcttcatgtatactattctcttgccaaaacttgcattttttaaaatgtgaaatgtctttctacctatttctgtgtattcagatcatccacatgtgaaaatccttgctaacgcctttcttagaatctcagaaagtaagattctaagaatttttatttttgagacagagcctcgctctgttgcccaggctggagtgcagtgacgtgatcttggctcactgcaacctccgtcttccagttcaagcaattctcctgcctcagtcttccgagtagctgggacaggcgagtgctaccacgcccaggtaatttttgtatttttagtagagatggggttttgctatgttggccaggctggtcttaaactcctgacctcaggtgatggacccgcctcagcatcccgaagtgctaggattacaggcgtgagccacggtgcctggcctaataatttttcatcttttaatttcatagtacttaatgtttcacatttttaatggcagttagcatcttctttataccatggatatttacatatggtttgtatacaaatatctcttgaactataactcttaaacataaactcttaaaagggcatacatgtttttatttatctttatatcctccacagtgccttattacatggtaaatgattaaataaagcctacaatccattcaaaggagtgaattcggtagccagggaaaatgacttgaggacatgagaggggacagtgtgcctctttatgatctttactgacattcttctgcaccacaattgtaaccactttcattacaaagtaatttagttttgtatattttctcctaaaatgccgtttcctaccctgtaggaacaaaaaaaatctgaacattttgtgtgtaacttagcagattcttagtaattctataaaattgtctaaactttttttttttttttttttttgagatggagtcttgctctgttgcccaggctggagtgcagtggcctgatctcggctcattgcaaccttcgcctcctgggttcaagcaattttcctgcctcagcctcctgagtagctgagattataggtgcctgccatcacgccctgctaatatttgtatttttagtagagacaaggtttcaccacgttagccaggttggtctcgaactcctgacctcaggtgatctgcccgcctcggcctcccaaagtgttggggttgtaggcgtgagccaccatgcccggccagctgtcaaaacttgtatctactagaaaaaatgttttatgctattctgtggagtctaaaaagctgaataagtcaaggttcctattcttcagaagcttaaaatgtcattttaatgtctctttatatgactgtaatttctacttgtgttctaagacttacagtcatttatttgcctgtgaagctttttttcttttctttcatccctacctcaaatatttaagggcctatgtgtacagtacaccctccaccctaagatgatatatcctgcttggccatcaggagatacttaggctatttttcttgagaatcctggttataattctacagtgatctcctagttgtttttagagctatccaggatatgccacctttaactcagttaactgaacttttgttttttaatatgtatgtagaatttgttcttacaaaagatagagtatactaaattatttatgaaatatatatatttttatttgtggtttactttaagattacaaattcagaaactcttgtccggtgttcacgtcttttggtgggtgtccttggctgctactgttacatgggtgtaatagctgaagaggaagcatataagtcagaattattccagaaagccaaggtaggagaatttatactaataaagtttcggataaatttgaatgaaatgtattcctgtgaaaattattacatttgtttggaagacattaaattttatgcaggttaaccctttctcttttatttatgtaatgtgagaagaaattatactatgtattttttaaattgttttaattgtttaatttttaattattattatactttaagttctggggtacatgatgtagagcatgcaggtttgttacatagatatacagtgccatggtggtttgctgcacccatcaactcgtcatctgcattaggtacttctcctaatgttatccctcccctagcccccgaccccctgtcaggccctggtgtataatgttcccctccctgtgtccatgtgttctcattgttcagctgccacttatgagtgagaacatgcagtgtttgtttttctgttcttgtgttagtttgctgggaatgatggtttccagcttcatccatgtccctgcaaaggacatgaactcatccttttttatggctgcatagtatatcatggtgtatatgtgccacattatctttatccggtctatcattgatgggcatttgggttgcttccaagtttttgctgttgtgaacagtgctgcaataaacatacgtgtgcatgtgtctttatagtaaaatgatttataatcctttgtgtatatacccagtaatgggattgctgggtcaaatggtatttctagttctagatccttgaggaattgccacactgtcttccacaatgattgaactaatttacactcccaccaacagtgtaaaagcattcctgtttctccacatcctgtccagcatctgttgtttcctgactttttaatgataggctgtaagcatgaaactctttcttatctcttggtagtactctgtcactggtatgatttgcaagaacagagtataagatttgccattttaaaaaattgttaatgagttttgcttatactgtatgactacgtggaacttctaaaaacatttcattttttctcttaagtgcactttattttttattttatagtatgtccaagatcaaagtacactgtaaaaagcaatactaaactataattttaactggaatttgcatttttccttctattcacaatagtctctaatgcaatgtgcaggagaaagtatcactctgtttaaaaataagacaaatgaggaattcagaattggttccttgagaaatatgatgcagctatgtacacgttgcttgagcaactgtaccaaggtaagattttcttcttcttgttttgttttttgagataggatctttctctgtcacccaggctggagtgcagtgggattgtcacaactcattgtagccttgacctcctggtttccagcaattctcctgcctcagcctcccaagtaattgggactacaggcatgtaccacctagctaaaattttctttttacttgaaagtgtagcctatgcagggaattgatcactggttggtgttactgttttggtgtccactcgtaagtttattttttacttttatttttcttttttttgagacagtctctcactctttcacccagagtgagtgatcacatcactgcgatccagcagcctcgacctcctgggctcacagcagcctcgacctcctgggctcaagtgattctcccacctcagcctccttagtagctgggactacaagtgtacaccaccatgcctggctgatttttgtatttttgtaattttttgtattgatggggttttacacattgcccaggctagtctcaaaccctgggctcaagtgatgcttacatctcaaagtgctgtgattacaggtgtcagctaccatatctgttcacattcataagttatacaaattgatttaaaattcagttgaatggtacataaaggtaatatccagacaaataagcaataggaatctgagtttctcatgaaactaattttataatttcaggaatttttctgagattgccttatgacttttatatacaaccatatagatgactcttttattcctgggacactttcattcatttaataaaaattttttgacccaaactatgtggtatgcgtagcggggctagtgagcaacacaacaataactccagcacatagtttactttcttttgctcagatcaccttacataacatttggtagaaagagtgctactgtgtttaatctttgtttttatctgcagcagcctgtgggatagccaagccaggccccagagtattgataataattggaaatatatttcaaacctagtattaggtacatggccatatagcaatattatcaacatatttcttggttttgtaatgtgtttttcctcctttttggtgtaagtggggaaggagaaaagtagaataaactctaacctataattatagctcacttatctttagggtcaatagctgttactttaatgttgttaaagcacaatgaaagatgtacagtatagttattataactctaagaaaagatgtgtttttgaagcagcatatatattggccctaatagtaaactatttatctacattccattcaagatagagaaaacactgtctgccaagaataattgtttttatttctttgttgcttggttctttgtttgtcttaattgcagaagagtccaaataagattgcatctggctttttcctgcgattgttaacatcaaagctaatgaatgacattgcagatatttgtaaaagtttagtaagtatgcttcctgttttgctatcatattttgattctaataggcataatttttttgttgaaatatctttgtaaataaggatgcatctcacaacatatagctcttaacatttttacaaatgtggaaattaaggccaggtgcggtggctcatgcctgtaaccccagcactttgggaggccgaggtgggtggatcacaaggtcaggagattgagaccatcctggctaacacggtgaaaccccgtctctactaaaaatactaaaaattagccaggcgtggtgacatgtgcctgtagtcccagctactcgggaggctgaggcagaattgcttgaacctgggaggtggaggttgcagtgagcgaagatcgtgccactgcactccagcctaggcgacagagcgagactccatctcaaaaataaaaaaatttaaaaaattaaataaaatgtggaaattaaataatttgtcttgtggggaaatatacctgattgcttcttaatatcaatacctagcatagtagtgcctgcctttagtttctcaataaataatacatttaaaaattgggaacgaatcatccaggctcacagctatatctgcgcaacattgtaccaaaatttaaaataattatttgttctttaaaagtgaccaaaaatcttgccaggcaagcaacatattcttattgtagtatttatttttcttccatacaaatgggcttatgccacatacattcttttttctggaacactgccgggcatacaaagtagttattgaaatatctattgagtgaaaacatattctgtaacttatttccattttatgacacatcttaatcattttccatgtcactgtacttattttataagctatctgctgttatactttatttatttagcagtgcatggtattctattgtgtggtgatagtgaatagtatatatgtatatgaaagcttatctgctcttttttttttttttttttttttgagacaaagtcttgctctgttgcccgggctggagttcagtggcacaatctcggctcactgcagcccccacctcctaggttcaagagattctcctgcctcagcctcccaagaagctgggattacagatgtgtgccaccacaaccggctaatttttgtatttttagtagagaccaggtttcaccatgttggccaggctggtctagaattcctgacctcaaatgatctgtccaccttggcctcccaaagtgcttggattacaggtgtgagccaccacactgagccaaaaagcccatctgctcttaattaacattttaagtggtttctagttttttgggttacaaagacttctgtggtacagattattgtacttttgtctatttgtatttgtgtgtatgatggatgtaggataatttctagcagtagacttgcttgttcaaaaggaatgtgaattttactttttgatggatattgtcattgtcctccaaaatagtcataccaatttaggcattttcctacaccctctttgggtaacactttaggtgttacaaaacttcttaatataagaaataattttgagggaggagccaagatggccgaataggaacagctccggtctacagctcccagcgtgaacgacgcagaagacgggtgatttctgcatttccatctgaggtaccgggttcatctcactagggagtgccagacagtgggcgcaggtcagtgggtgtgcgcaccgtgcgcgagccgaagcagggcgaggcattgcctcactcaggaagtgcaaggggtcagggagttccctttctgagtcaaagaaaggggggacggacggcacctggaaaatcgggtcactccccgaatactgctcttttgcgacgggcttaaaaaacggcgcaccacgagattatatcccgcacctggctcggagggtcctacgcccacggagtctcgctgattgctagcacagcagtctgagatcaaactgcaaggcggcagcgaggctgggggagggatgcctgccattgcccaggcttgattaggtaaacaaagcagccgggaagctcgaactaggtggagcccaccacagctcaaggaggcctgcctgcctctgtaggctccacctctgggggcagggcacaaacaaaaagacagcagtaacctctgcagacttagatgtccctgtctgacagctttgaagagagcagtggttctcccagcacacagctggagatctgagaacgggcagactgcctcctcaagtgggtccctgaccctgacccccgaacagcctaactgggaggcaccccccagcaggggcacactgacacctcacatggcagggtactccaacaggcctgcagctgagggttttgtctgttagaaggaaaactaacaaacagaaaggacatccacaccaaaaacccatctgtacatcaccatcatcaaagaccaaaagtagataaaaccacaaagatggggaaaaaacagaacagaaaaactggaaactctaaaaagcagagcgcctctcctccaccaaaggaacgcagttcctcaccagcaacggaacaaagctggatggagaatgactttgacgagctgagagaagaaggcttcagacgatcaaattactctgagctacgggaggacattcaaaccaagggcaaagaagttgaaaactttgaaaaaaatttagaagaatgtataactagaataaccaatacagagaagtgcttaaaggagccgatggagctgaaaaccaacgctagagaactacgtgaagaatgcagaagcctcaggagccgatgcgatcaactggaagaaagggtatcagcgatggaagatgaaatgaatgaaatgaagcgagaagggaagtttagagaaaaaagaataaaaagaaatgagcaaagcctccaagaaatatgggactatgggaaaagaccaaatctacgtctgattggtgcacctgaaagtaacggggagaatggaaccaagttggaaaacactctgcaggatattatccaggagaacttccgcaatctagcaaggcaggccaacattcagattcaggaaatacagagaatgccacaaagatactcctcgagaagagcaactccaagacacataattgtcagattcaccaaagttgaaatgaaggaaaacatgttaagggcagccagagagaaaggtcgggttaccctgagagggaagcacatcagactaacagcggatctctccgcagaaactctacaagccagaagagagtgggggccaatattcaacattcttaaagaaaagaattttcaacccagaatttcatgtccatccaaactaagcttcataagtgaaggagaaataaaatactttacagacaagcaaatgctgagagattttgtcaccaccaggcctgccttacaagagctcctgaaggaagcattaaacatggaaaggaacaaccggtaccagccgctgcaaaatcatgccaaaatgtaaagaccattgagactaggaagaaactgcatcaactaatgagcaaaataaccagctaacatcataatgacaggatcaaattcacacataacaatgttaactttaaatgtaaatggactaaatgctccaattaaaagacacagactggcaaattggataaagagtcaagacccatcagtgtgctgtattcaggaaacccatctcacgtgcagagacacacataggctcaaaataaaaggatggaggaagatctaccaagcaaatggaaaacaaaaaaaggcaggggttgcaatcctagtctctgataaaacagactttaaaccaacaaagatcaaaagagacaaagaaggccattacataatggtaaagggatcaattcaacaagaagagctaactatcctaaatatatatgcacccactacaggagcacccagattcataaagcaagtcctgagtgacctacaaacagacttagactcccacacattaataatgggagacttttaacaccccactgtcaacattagacagatcaacgagacagaaagtcaacaagtatacccaggaattgaactcagctctgcaccaagcagacctaatagacatctacagaactctccaccccaaatcaacagaatatacatttttttcagcaccacaccacacctattccaaaattgaccacatactgggaagtaaagctctcctcagcaaatgtaaaagaacagaaattataacaaactatctctcagaccacagtgcaatcaaactagaactcaggattaagaatctcactcaaaaccactcaactacatggaaactgaacaacctgctcctgaatgactactgggtacataacgaaatgaaggcagaaataaagatgttctttgaaaccaccgagaacaaagacacaacataccagaatctctgggacgcattcaaagcagtgtgtagagggaaatttatagcactaaatgcccacaagagaaagcaggaaagatccaaaattgacaccctaacatcacaattaaaagaactagaaaagcaagagcaaacacattcaaaagctagcagaaggcaagaaataactaagagcagaactgaaggaaatagagacacaaaaaacccttcaaaaaattaatgaatccaggagctggttttttgaaaggatcaacaaaattgatagaccgctagcaagactaataaagaaaaaaagagagaagaatcaaatagacgcaataaaaaatgataaaggggatatcaccaccgatcccacagcaatacaaactaccatcagagaatactacaaacacctctacgcaaataaactagaaaatctagaagaaatggataaattcctggacacatacactctcccaagactaaaccaggaagaagttgaatctctgaatagaccaataacaggatcagaaattgtggcaataatcaatagcttaccaacaaaaaagagtccaggaccagatggattcacagccgaattctaccagaggtacaaggaggaactggtaccattccttctgaaactattccaatcaatagaaaaagagggaatcctccctaactcattttatgaggccagcatcatactgataccaaagccaggcagagacacaaccaaaaaagagaatgttagaccaatatccttgatgaacattgatgcaaaaatcctcaataaaatactggcaaactgaatccagcagcacatcaaaaagcctatccaccatgatcaagtgggcttcatccctgggatgccaggctggttcaatgtacacaaatcaataaatgtaatccagcatgtaaacagaaccaaagacaaaaaacacatgattatctcaatagatgcagaaaaggccttggacaaaattcaacaacccttcatgccaaaaactctgaataaattaggtattgatgggacgtatctcaaaataataagagctatctatgacagtcccacagccaatatcatactgaatgggcaaaaactggaagcattccctttgaaaactggcacaagacagggatgccctctctcaccactcctattcaacatagtgttggaagttctggccagggcaatcaggcaggagaaggaaataaagggtattcaattaggaaaagaggaagtcaaattgtccctgtttgcagacgacatgattgtatatctagaaaaccccactgtctcagcccaaaatctccttaagctgataagcaacttcagcaaagtctcaggatacaaaatcaatgtacaaaaatcacaagcattcttatacaccaacaacagacaaacagagagccaaatcatgagtgaactcccattcacaattgcttcaaagagaataaaatacctaggaatccaacttacaagggatgtgaaggacctcttcaaggagaactacaaaccactgctcaaggaaataaaagaggatacaaacaaatggaagaacattccatgctcatgggtaggaagaatcaatattgtgaaaatggccatactgcccaaggtaatttacagattcaatggcatccccatcaagctaccaatgactttcttcacagaattggaaaaaactactttaaagttcatatggaaccaaaaaagagcccgcatcggcaagtcaatcctaagccaaaagaacaaagctggaggcatcacactacctgacttcaaactatactacaaggctgcagtaaccaaaacagcatggtactggtaccaaaacagagatatagatcaatggaacagaacagagccctcagaaataacgctgcatatctacaactatctgctctttgacaaacctgagaaaaacaagcaatggggaaaggattccctatttaataaatggtgctgggaaaactggctagccatatgtagaaagctgaaactggatcccttccttacacctgatagaaaaatcaattcaagatggattaaagacttaaacattagacctaaaaccataaaaaccctagaagaaaacctaggcattaccattcaggacataggcatgggcaaggacttcatgtctaaaacaccaaaagcaatggcaacaaaagacagaattgacaaatgggatctaattaaactaaagagcttctgcacagcaaaagaaactaccatcagagtgaacaggcaacctacaaaatgggagaaaattttcgcaacctactcatctgacaaagggctaatatccagaatctacaatgaactcaaacaaatttacaagaaaaaaacaaacaaccccatcaaaaagtgggcgaaggacatgaacagacacttctcaaaagaagacatttatgcagccaaaaaacacatgaaaaaatgctcatcatcactggccatcagagaaatgcaaatcaaaaccacaatgagataccatctcacaccagttagaatggcagtcattaaaaagtcaggaaacaacaggtgctggagaggatgtggagaaataggaatccttttacactgttggtgggactgtaaactagttcaaccattgtggaagtcagtgtggtgattcctcagggatctagaactggaaataccatttgacccagccatcccattactgggtatatacccaaaggactataaatcatgccgctataaagacacatgcacacgtatgtttattgtggcattattcacaatagcaaagacttggaaccaacccaaatgtccaacaatgatagactggattaagaaactgtggcacatatacaccatggaatactatgcagccataaaaaatgatgagttcatgtcctttgttagggacatggatgaaattggaaatcatcattctcagtaaactgtcgcaagaagaaaaaaccaaacaccgcatgttctcactcataggtgggaattgaacaatgagatcacatggacacaggaaggggaatatcacactctgtggactgttgtggggtggggggaggggggagggatagcattgggagatatacctaatgctagatgacgagttagtgggtgcagcacaccagcatggcacatgtatacatatgtaactaacctgcacaatgtgcacatgtaccctaaaacttaaagtgtaataaaaaaaataataatttttaaagtttgcatattattttgttatgtagacatattacaggttatatatccattttactattgttggacatttagtagaaaaagtactgtagttttcatacttacacatgaaccttgaattgtttgattaggtaaattttttttttttttttttttttgagacagagtctcgcttcgtcaaacccaggctggagtgcagtggcatgatctcagctcactgcaatctctgcctcctgagttcaagtgattctcctgcctcagcttcctgagtagctgggattacaggtgcccaccaccacacccagctaatttttgtattttaaatagagacaaggtttcaccatgttggccaggctggtttcgaactcccgacctcaggtgatccacctggctctgcctcccaaattgctgagattacagatgtgagccactgtgcccagcctgattaggtaaattttgactacagcatgctcctgcaagaagccatcttgaacatctttgtttctcttccttgaaggcatccttcatcaaaaagccatttgaccgtggagaagtagaatcaatggaagatgatactaatggaaatctaatggaggtggaggatcagtcatccatgaatctatttaacgattaccctgatagtagtgttagtgatgcaaacgaacctggagagagccaaagtaccataggtaaatacatatttactacttgggatttcttttacttctttatattgatttggcagtataagaggcctcattgatatcaattttgtgcttatttcattttctcttagtatagccttttaggattgttcctttcttatatactttattttttttttatttttacttgaatttattagtttcatattttattcttcatagaaggaacttaagataactattaaagaaataaaaccaggccaggcatggtggctcacgcttgtaatctcagcactttgggaggccaaggcgggctgatcatgaggtcaggagatcaagaccatcctggctaacgtggtgaaaccccatctctactaaaaacacaaaaattagatgggcgtggtggcgggcgcctgtagtcccagctactcgggaggctgaagcaggagaacggcatgaacctggggaggtggaggttgcagtgagccgagatcatgccactgcattccagcctgggcgacagagcgagactccgtctcaaaaaaagaaataaaatcatatgataggttatttcctcaatagaaagcaggaaatgaaaacacacctgtaatgccattgcttttaacctttttctattatttctctgtagaaacattcaaaattgtagtcaacatcaacattcacatgttatgaatgcctgtttaattataagtatttttccaggtagttgcttttcttgatagtcatactttttaatggcttcaccatttttctgtcataaataccataatttacttgacattttttattgtcagaaatttagattcttttctattttcctacaataaacattattgcaatgatcatttgtctaagggtttttttttctcatattttaaattatttcttgacaacagaatcttggataatttttcaaaaagacttttgaagctttcagtatataattaatttcactataattttgcttttcatatacttttttttgtgaagaggaggaaatttgagttaatatgactatatatggctgttgtgcccttctcttagtgttaatgagtgctttttatttttaggtgccattaatcctttagctgaagaatatctgtcaaagcaagatctacttttcttagacatgctcaagttcttgtgtttgtgtgtaactactgctcagaccaatactgtgtcctttagggcagctgatattcggaggaaattgttaatgttaattgattctagcacgctagaacctaccaaatccctccacctgcatatggtgagttacgttaaatgaagaagctcttggattttatctgatgttgctgactaaatgtaatgagttgacatgtaagaatcacatggtgtctttgaagaattgaaattgctttcttgagaaatgaacctgagactagttggaaaataacacttttaacgtgctgtgagcaaatttaagtggatgctgaaatattaaaacttagatgggttttggatagatttattctctttaggtttaattgttataaattattttaattaggctaagaaacatagaccctgaatgtaaaaatattacataacattgtgtttgaagttggaaccttgcctttgaccttagtttatatattttcagttttttggatttgatttcaaaatgatagtgaagttacaagaatactacagttaacgttttaccatatttgcttaatcattccctctctccacacacacactcatacgcagatacacacatcattttctctgaaccattttgagatgaaatcgcacacgtgatgctccttatacttcagtgtatatttcctaaaaacaaggatacacttctgtttagccacagtataatcatcaaaatcaggaagttaacattttgtcattgcatttaggtgtgtagtctgtttagtctccttcaatctggaacagttcttttttttatttatcatgaccttcatatatttgaatagtacaggtcccttgctctgagtttgtctgatgtttccttatgattaaatttatactttgacgagaatgttgcaaaagtaattcctcttctgccttcaccctgtccatttatctgtctgttgatagatatcttcaaatccaagccaacatcacacagtttatctttttttctgtccaaatttataaattgctttactagcagttaaaaaaaacaccccaaaacctgactatccactcaacctgaatgcatttacttatttgctcaacaaccttatatataactaatctaaccatgtgggccattttcttagccctagccccagtgtatgtggaggtagagcctctggcctagcgagtagcaagttgggtcctaggtcatgtccccagttccagcaaattgtcacacatgcctggtgagtccctaattagaacctctgatcacagtaaattgtaggctgagtcattggtggaatccctggtcatgtttcccacccttggtgaaaatgcacgtcaatcccttagagtgagaagacaagtttggttgtgccctgtttgggcccctggtttaggtcctcgcagatactcaagtctctatccctgaccaagaggaagttacatgcttttcttgaagtattgatgtttcaagtcacttcagaacattcagtaacctcatgtacatgactctcatgtcaaataatgaaaaggatcatttaatttcctttgttaatatctgaaaaggattaagaaatatattattctatatgtaaataggaaaaaaaatcccttattatttcagtatagccagaaaattatttggtagttctcggaaactggctgcccagataataactaccattataactggtcgttgcagcagccctttctgtgcatagtaccataaagagccttacaagattgccttatgggaagataggtcaaggtttttgacttcttccctgcccatgattatctctgctttccaaaattcattaatagttttcaaccactggtctattatccccaagcattattttgggagagtggagacttacagtttcagaatcttgctcaagctcttaactgcaacagtggtaataatgatcatttattgaattccacaatagaagctagacttttacgtttattttctctaatcctcacagttatctggccaggtaagtgatatatcttcactctactgatgagggtacgaaggccctagatgacataaggcaagttttttaccagaaaagttaaggctgtggtactgggatttgaattttctgtttgacttcaaagccttttgtttttactatacacctcttaaatatttacagctgtgtgtgtgtgtgtatgtgtgtgcatgtatgaatttatgtttatatacttaaaaaaaatttttttttgagacggaatctcgctctgttgcccgggctggagtgcagtggcgcgatctcggctcactgcaaccttcgcctcccaggttcaagcgattctcctgcctcagcctcctgagtagctgggattataggcgcctgccaccacccctggctaatttttgtgtttttagtagagatggagtttcaccatattggccaggctgttctcaaactcctgaccttgtgatctgcctgcttcagcctcccaaagtgctgggattacaggtgtgagccactgcacccggcctatgtttatatactttttaaagtaaatgatttgtggataaacctgatttttttccctcctaccatcttagtatctaatgcttttaaaggagcttcctggagaagagtaccccttgccaatggaagatgttcttgaacttctgaaaccactatcgtaagaaattaaaaccttatgttatgttcactttaaagttataaaataactgatgtgttctgttaagcttataaagttgaactttttttttttttttaccacagcaatgtgtgttctttgtatcgtcgtgaccaagatgtttgtaaaactattttaaaccatgtccttcatgtagtgaaaaacctaggtcaaagcaatatggactctgagaacacaagggatgctcaaggacagtttcttacagtaattggagcattttggtaggtacagtctattttgtggtcctatttttcttttgctatctgtggatacgaatgcaagttttgtatccacatcagtgatttcttctgatcttcctacatagctaatacatcttttaagaatagcagaatgtaatttgtgtttccctcagtcgcttgaagaactacattgctttttgtttaaggcttggctttctaaaccgtttaactcatttctctgcaaattttgaatcacttaataatttgacatgtatagtgaataaaggataacaagccaaaatcagttgaattgttcatgttccctaagtgaacaaattggccttgtccttatctggttattttatgcatattgtcacattccaagataacaccctgatacttacagaggagcacatacatataatttagaacccttgtactatctgattgctaagtaattctaaatcaatagactgttttttgtttttgtgtttttttgagatggagtctcactccatcacccaggctgcaggctggagtgcagtggtgctatatctgctcactgcaacctccgcctagtaggttcaagcaattgtcctgcctcagcctcctgagcagctatgattacaggctcccaccacaatgcctggctaatttttttgtatttttagtagagatggggtttcaacacgttggccaggctggtcccaaactcctgacctcaagtgatctgcccaccttggcctcccaaagtgttgggattacaggtgtgagccagtgcacccagcctgaatgtggttttgaaatcttcaatataccaaacaaagaaatcttcaatataccaaacaaagaaatttctttctaaagtaagtttactgtaatgtagtttagccattctatggtagcccccaaaaaaggacataatggtataaaacaaataatatacgctaaaatgaattcttttacactaatttcttttagcttgaatttttggcaaggtgagtatgttggcatattccacataatgacaaataagtttagcacagaaagacatattggaagtaacttacaataacctttcagtgagttttctgagtgcttttatcagaatgattatttaactttggaaaacttacttgatttcaggcatctaacaaaggagaggaaatatatattctctgtaagaatggccctagtaaattgccttaaaactttgcttgaggtgagtttttgcatttttttagtaagatctccattgaaaattttaaagcagtctttgtttgttaatgagtaatttttctctatttcatatttaaccacagttcttttcccgtaggctgatccttattcaaaatgggccattcttaatgtaatgggaaaagactttcctgtaaatgaagtatttacacaatttcttgctgacaatcatcaccaagttcgcatgttggctgcagagtcaatcaataggtaatgggtcaaatattcatgaagtatttggaatgctgcagatggcagtagaatgtcttacatagtaacagctcacagttgcaatattaaaaatagctaacacttgttgagtatatacggtgtgcctggcatttatgtttattcttaattcttatacttctgtcacttagattctattatttccttcaatttataaatgaaaactgtgacttagtgaggtaaagtaacttgcttatgccacagagctaacaagtggttgactcgagtgaggtgtgtctactatcatgtacaggagatacggactgtttggaaattactgtgattttatgtgagtttatgaaatgataattagcacattttacattgtgctaattacaattatatttacttgagtgaacatccagtgaagcactggaaggattctatcatgaggatcttttatatttgagtactggaataaacatatattaatttcattctttttttttttttttttttttttttttgagatggagtttcgctcatgtctcccaggctggagtgcaatggtgtgatctcggttcacttcagcctctacctcctcggttcaagcaattctcctgcctcatcctcctgagtagctgggattacaggcgcctgccaccatgcccagctaatttttttatttttcgtagagatggagtttcaccatgttggccaggctggtcttgaactcctgacctcaggtgatccacccaccttgtcctcccaaagtgctgagattacaggcgtgagcctttaatcatgtagtttttgtcattcgttctgtttatgtgatggattatgtttattgatttgtgtatgctgaatcagccttgcgtcccagggatgaagctgacttgatagtggtggataagcgttttgatgtgctggattcagtttgccagtattttatcgaggattttcacatcgatgttcatcacggataatggcctgaaattttctttttcttgtgtctctgccaggttttggaatcaggatgatgctggcatcataaaatgagttagggaagagtccctctttttctattgtttggaatagtttcagaaggaatggtaccagctcctctttgtacccctggtagaattcggctgtgaatccctctggtcctgggctttttttggttggtaggctattaattactgcctcaatttcagaacttgttattggtctattcagggattcgacttcttcctgctttagttgggaggttgtatgtgtctaggaatttatcactttcttctagattttctagtttatttgcatagaggtatttatagtattctctgatggtagtttgtatttctgtgggatcagtggtattatcctctttatcattttttattgagtctatttgattcttctctctttattagtcttgctagcggtctgttttgttaatcttttcaaaaaatcagctcctggattaattgatttttttgaaaggttttttttgtgtgtgtgtgtctctatctccttcactcagctctgatcttagttatttcttgtcttctgctagcttttgaatttgtttgctcttgcttctctagttcttttaattgtgatgttagggtgttgattttagatctttcccactttgtcctgtgggcatttagtgctataaatttccctctaaacactgctttagctgtgtcccagagattctggtacattgtgtctttgttcttattggtttcaaagaacttacttatttctgccttcatttcattatttacctagtagtcattcaggagcaggttgttcagtttccatgtagttgtgtggttttgagtgagtttcttaatcctcagttctaatttgattgcactgtgatctgagagactgttacgatttccattcttttgcatttgctgaggtttgttttactttcaattatgtggtcagttttagaataagtgtgatgtggtgctgagaagaatgtatattactctgttgatttggggtggagagttctgtagatgtctgttaggtctgcttggtccagagttcggttcaagtcctgaatatccttgttaattttctgtctcattgatctgtctaatattgatggtggggtgttaaagtctcccgctattattgtgtggaagtctaagtctcttcgtaggtctaagaacttgctttatgaatctgggtgctcctgtattgggtgcatatatatttaggatagttagcacttcttgttgcattgatccttataccatcatgtaatgtccttctttgtctttcttgatctttgttggatgtttgttttatcagagactaggattgcaacccttgctttttttctttctatttgcttggtaaatattcctccacccctttattttgagcctatgtgtgtctttgcatgtgagatgggtcccctgaatacagcacactgatgggtcttgactctttatccaatttgccagtctctgtcttttaactgggacattttagcccatttacatttaaggttaatattgttatgtgtgaatttgatcctgtcattatgatgctaactggttattttgcccattagttgatgcagtttcttcatagtgtcaatggtctttacaatttggtatgtttttgcagtggctggtaccagctttgcctttccatatttagtgctaccttcaggagctcttgtaaggcaggcctggtggtgacaaaatctctcagcatttgcttgtctataaaggattttatttctcctttggttatgaagcttagtttggctggatatgaaattctgggttgaaaattattttctttaagagtgttgaatattggcccccactctcttctggcttgtaaggtttctgccgagagatctgctgttaagtctgatgggcttccctttgtgggtaacccgacctttctctctggctgcccttaacattttttcattcatttcaaccttggtgaatctgatgattatgtgtcttggggttgctcttctagaggagtatctttgtggtggtctctgtatttcctgaatttgaatgttggcctgtctcgctagattggggaagttctgataatatcctgaagggtgtttccaacttggttccattctccccatcactttcaggtacaccagacaaacgtagatttagtcttttcatatagtcccatatttcttggaggctttgtttgttccttttcattcttttttctctaatcttgtcttcatgctttatttcattaagttgatcttcaatctctgatatcctttcttctgcttaatcagttcggctgttgatacttgcgtatgcttcacgatgttctcatcctgcatttttcagctccatcaggtcatttatgttcttctctacactgattattctagttagcagttcctctaaccttttttcaaggttcttagcttccttgcattgggttagaacatgctcctttagctcagaggagtttgttattacccatcttccgaagcctacttctgtcaattcgtcaaactcattctccgtccagttttgttcccttgctggtgaagaattgtgatcctttgcagcagaagaggcattctggtttttggaattttcagcccttttgcgctggtttttcctcatcttcgtggatttatctacctttggtctttgatgttggtgacttttgtatggggtttctgtgtggacatcctttttgttgatgttgatgctattcctttttgtttgttagttttcctttttacagtcaggcccctctgctgcagatctgctggagtttgctggaggtccactccagaccctgtttgcctgggtatcatccatggaggctgcagaacagcaaagattgctgcctgttccttcctctgggaaggttcgtcccagagcggcacccgccagatggcagcgggagctcttctgtatgaggtgtctgtcgacccctgctgggaggtgtctcccagtcaggaggcacgggggtcagggacccacttgaggaggcagtctgtcccttagcagagctcgagcgctgtgctgggagatccgctattctcttcagagctggcaggcaggaacgtttaagtccgctgaagctgtgcccacaaccacccctttccccaggtgctctgtgtcagggagatgggaattttatctataagctcctgactggggctgctgcctgtctttcagagataccctgcccagagaggaggaatctagagaggcagtctggctacagtggctttgtggcactatgttgggctccacccagttcgaacttcctactggctgtgtttatactgtgaggggaaaacatcctactgaagcctcagtaattgcagacgcccctccccccaccaagcttcagtgtcccaggtcgacttcagactgttctgctggcagcgagaatttcaagccagtggatcttaacttgctggtctccatgggggtgggatccgctgagctagaccacttggctccctggcttcagccccctttctaggggagtgaatgggtccgtctcgctggcgttccaggtgccactggggtatgaaaaaacactcttgcagctagctcagtgtctgcccaaatggccgcccagctttgtgctttaaacccagggccctggtggtgtaggcacccaagggaatctcttggtctgcgggttgcaaagactgcgggaaaagcgtagtatctgggcaggaatccaccattcctcacagcatagcccctcacagcatagtccctcacggcttcccttggctaggggagggagttccccgaccccttgtgcttcccgggtgaggctacaccccaccctgctttgactctccctccgtgggctgcacccactgtctaaccagtcccaatgagatgagccatctacctcagttggaaatgcagaaatcaccaccttctgcgttgatctcactgggagctgcagaccagaactgttcctatgttgccatcttgctgttcccttgttttatttttctctagtatttatgataacgtgaaacatattttaatatatttacttctccgtattccactagtatatatgttcctaaaggcactggtttttgtctgttctgttcattgttgtatttttagcacctaaaacaatacttggcatgtgataggtatccaataactgttttaaaataaatgaatgtacttgaaaaaaaattacatgatgcttcaaaaacatcaaagctgaaaatcatttgagtaactttaaaatgtaagcaatcaataataaaagattactatattgttcagcagtcacataaagtattaaaactaatatttcagtatttgaatatgccgacagtaatgttttcataaactagattttgtgtctaactcctcaggtttggaactgtttttagtaagaccataatgcattgcaaggatttctaatgaatatgtttagtagttcaagcccttattaaatttcacagataaaagcaaatgtatgctgaactttaaggactgaggtaatataagactgaattgaatgtaataaggcggcagtgtagtggtggcattaaaaaaactgaagattcaaaaagtataaattcaagaataacatgcaagtagcattcttttttttaattttacacttgttagattttgtcttagtccctttgtgttgctataaaggaatacctgaggctggatatttacaaagaaaagaggtttatttggcatatggcgtctacatctggtaagggcctcagactcatggcagaaggcaaagaggaatcagtgtgtgcagagatcacatggtgagagaggaagcaagggtggaggcggggaaggccatgccaggctcttttttttaataaccagcccttgtgggaactgaatagtgagaactcactcattccttaccctcaggccttaatctattcgtgagggatctgcccccatgactccgacacctcccattaggcataacctaatggggatcagatttcaacatgacatttggaggggttaaacattcagacaatagcagatatctaatgttcagctattttaagagcagtgagtgaaactagaagaatcagaggaacataaacaattataaaagcttcgattactaaaaaaggataaaagacaaagttgattaaagagttatccttaaatatgtgggtgttacgcaaaaggtgtactgatcaacttttttccatcacataaaacaaaatttaaatggtacataaaaacattaacttacccgctttcagagtgattaaatgttagagcaggttgacattggaatctgtggactcaactaattggtgttcggccagagaacagtttatcttttctggctagtttgagttcagtgctgttcaaatttgagcaatagttaaaatatattttgagaccctcttcagttctaggagaaaatagattttgtattcaagaccttaatactaagctgctggtctgaacctctttaaataaactcaggttttgttagtctttaagaaagagctagtatgttattatgtctcacagagtgatttatttttgttctggaatatgctttggaaagtagggtttgaaattagaaaattatttcactttttgtttgtttgtttgcttgcttgttttaagattgttccaggacacgaagggagattcttccaggttactgaaagcacttcctttgaagcttcagcaaacagcttttgaaaatgcatacttgaaagctcaggaaggaatgagagaaatggtaattttaagtaacatgtatttgctgttatcatatgcttgctatgaatatcccataaattacttcaccaagtttggtataagagagtttataatccagtagtttacagtataaagctgctctaaaacaactgtatgaattgattgaaactgcattctttctgggtcacaatgggtcaaatcatagcaatttcttttggtttagcatttttatggagaaacccaaaatttaactgagtttttatgggagtataaatggctcccttttttattttaaaaatccttttatatgtgatctgattaaaagctaattaagggaacaggtgacaatgggaagaaatggattgaggagaagaatctcacacaaaatcaaatcattgtggtgtttacagtgaaacttgtgatatttcacgtttctgtagaataatatattttttatggtaatgattatcttagagttcaaattttttcatttatttatgccctggtttgtttcttacaagtatttaaggtagttaaataactgtcaagtctgtgatagcaggaaattgaaaggaacaattgaaagaatgtgagtttagaaaagaatttcaatagattagaaagataagtgtaaataacataaaatctaatgagataatgtatattatacattttaaatcagcctgtcatctgcaaaaagggaaaatactgatctgacagcaattcatttagaaaaagacctaggaagttttgtatcttgtgattatagtatgaatcaacattgtattacagttaccaaaaaggctaactctgtcttacactgcattaatagaagcatattgtcatgaacaaagttaatacaagaacttggatcttttatactttttgctttatttttagatcttttaatttttatgggtacatagtaggggtgtgtgtgtgtgtgtgatacgggtatacaatgtgaaataatcacatcatggagaatggggtatccatcccccaaacaaatatcctttgtgttacaagcaatccaattacactgttttagttattaaatgtttctgtattttttagaggataactataatgtttggtttggttctgagtaaagtaaaagatttttagccagaatgttatagatctgtgtcttataaaaaatggatgaaggaattgacttagtggaaagctcacatttgtttttaaacatgtcagtgcttgtgatttagcaaaggtattggtccttactctttcttgtaccaaaagacagaactaggattagtgagtaggaggtttctgaaatgtgtatagcttgtcaaaaaatctggagttcagttgggattttataattgattgttaaacatttacattttacattacattttttttttaatttctttttaagtcccatagtgctgagaaccctgaaactttggatgaaatttataatagaaaatctgttttactgacgttgatagctgtggttttatcctgtagccctatctgcgaaaaacaggctttgtttgccctgtgtaaatctgtgaaagagaatggattagaacctcaccttgtgaaaaaggtatatatggatgagtattttattagaagcttccttaggtcactgtgaaataatttaaaaagttaaagctagattttctgagtggcacttatttaagactaggaaacaattttattttttaggttgggaatattggaaagcagttatacaaaaactattcaaatggtatatttatggtatgcactgtttcttacattccatttaagagcatttcacaaggctttcattgtactaacaagagtgaatgacttgtccaccagactgaccaggcttttggaaatagtatttattgagggaaacacatggagacaagagcagcataggtgttttgcccggtagattctggggcagcacattgggatccagcagggccagaagtcaaattttagagctatcaggcttttaagttcagttatcaggggagaaggactagggtccaagccttataattactacatcagcacagtattatagaatgttggccccgtctcttttccatcacctcagcatttatggtttaggaagttccagacctttccattgcaaatttttatgtgataaatcagtggtaggtcagtggactgatattatgccagttaacattctaccagcatagtttccatggtgctttggagtaagccagcctataatcagttagccttttacctctcagtataagacttgttcggtgtttcttaaaagtatacaaatacattacctaataatcataagtgttatgtattgtttggatttttcttatttggatttaagcctaagagaaataattttactttatatttatttatttattttgaaagacagggtctcactctgtcacccaagctggagtgcggtgatgtgatcatggctcactgcagtcttgacctcctgggctcaagcgatcctcccaagcctcctgagtagctgggactacaggcatgtgccaccacacctggctaatttttttttttttttttgagacggagtctcgctctgtcgcccagactggagtgcagtggcatgatctcggctcactgcaagctccgcctcctgggttcatgccattctcctgcctcagcctcccgagtagctgggactacaggcgcccgtcgtcacatccacacacctggctaatttattatacagacgggctcttgctatgttgcccaagctggtcttgaactcttgggcttaagcaaccctccctcctcagactcccaaagcgttgggattacaggtgtgaaccaccactggccagtaattttacattaaatcttcctttaagtataaccaaatgttggaaactcttagcatatttttatatttttatttacttaacatttattaagggtttgctatgtgtcagatactgtgccagttgagtacattttcttaattattattcccatctcatagatgaggaaatcaagaaaagttgaatgaatgttgtttctaggtcctactctaaataatattaacaagcatttaaatgatttatttttttcatttttcttaacacattgactttttggttcgtgcaggttttagagaaagtttctgaaacttttggatatagacgtttagaagactttatggcatctcatttagattatctggttttggaatggctaaatcttcaagatactgaatacaacttatcttcttttccttttattttattaaactacacaaatattgaggatttctataggtaagtttatacatgacatatgtgaaatttgtttaatttaaaattagttaacaatacttagcaagtcccctcaccagcaacacacataccatacccatacacatgtgtgtgtgggagcctacatagtatgagaagcaggacagcttcttttaataagaatgtattgaagggagtcactggacttcagatctggtcctagctgtgccaacaaccagctatctgactttggtcaaaccacataaagaccctctatgccttggttttttaatatgtaaagtaagcaagttacacaaggagatctttcaggtccttttcagctttaatatttgatcatctttcctttggaaaaaattgaagataaattactagtagctggttatttctgccttgtttttcttttctgttgcttgactataggcctcttagttattacttctattagatttagaaacttaatgtaaaactttattttgctaactttaactctgtagaagaaaaatttgaaaatggagaggtttgaaacaactaaaaagtaatgtttaggtatcaggatgatgggaaggcatctcatatttgttgaacatgctctgtgttatggactttgctatgcattttacatgtagtgtatcacagatctgagtttcagacttatcctaatagagttttctaatagattatgagttgtatgtaggtagtttcctttaagaaggatattcctacaaaagtaaatttagtggtccttatagttcattcattttggcaagaacaatatagctatatctctgtatatgcgagggattcattccaggatcccccatgtatgcctaaatttacgcgtactcaagtcaccaagttggccctgcagaacccacgtatatgaaaagtcagtcctctgtatatacagactttcacatcctgtgaatactgtttttctatctgcatttggttgaaaaatatgcaagtataagttcaaacccatgtttttcaagggtcaactgcatttatgttagttgattatgcagaagaaataaatataaattcaagtctccatttttatttgtttattgttttgttttttctttttgctaagggtgctactgaacaaggtcccatttttaaatcccataattatggtggtggtatgttctaagctttctaatttttttaatgtgactatttagaatttacttaatttttccatttataaaattaaagaatgtttaataatctggataaagtatgatactttaatgctgatggtattaaaacagtttttaagaactattttataaaattttacttggaaaagttatatataacctgtattttaaatttttctatttttagatcttgttataaggttttgattccacatctggtgattagaagtcattttgatgaggtgaagtccattgctaatcagattcaagaggactggaaaagtcttctaacagactgctttccaaagattcttgtaaatattcttccttattttgcctatgagggtaccagagacagtgggatggcacagcaaagagagactgctaccaaggtctatgatatgcttaaaagtgaaaacttattgggaaaacaggtatggcttcaatttttatgtacttttcattccctgaatgatatgagatataacctttaagttttaaggctatttattcgatttattcgtatttatatattgaaacttagcttgtggtaatcattatctagcatagccaacccatgaatttttttggttatgtcgtgttgtctccctctgattggcttttaactaagtagaaatgttttaaattagaaataatccaaaaaaccatttgaataattttcttctgccatttaaaaatttattttaactgttgtaatacacgaatgcaaactggttgttaaagtcaaggaatactaaacagtgtacagaaaaccttcactccctcttcaatctcaccaagctttccacttttcaagaaaaacaaccgtccctcattcctatagttctcataccctgctgtttgtttttttgtgacacttattaccttctaatgtatgatacaatttaccttttttttctgtctttgcttttgtttttgagacagagtcttactcttttgccaagactggagtgcagtggcatgatctcagttcactgaagcctctgtctcctgggttcaagcaattctcctgcctcagccacccaagtagctgggactacagctgcgcaccaccacacccagctaattttcatatttttagtagagacggggtttcaccatgttggccaggctggtctttaactcttgacctcaggtgatcttcccacctcagcctcccaaagtgctgggattacagatgtaagccaccttgccagaccataatttacttttgaattatgtttattatttaccagtcttctccagtatacatttttctctctttttttttttttggctgatgtatctctaatatattttgagtattcattaaatgtttgtcaaaagaaggagtcaagtaaggaaggatttaaaaagcttcgtttgttttataatcatttatatacatttccaaaattttttgaagcaacttatattaaaacatacatacaaattttttaagataaaaaagctgtggtcaccccacatttatgtatgtatttatttattttggatataagtaagggataagtaaccaaacttggtcaatattagataaacttcaagggaccttttttttttttagtttcctagttatctatattgaaccaagaaatggaacagcaagttccttagttgcttaggtggacctattcagaactggttgtaagtctgcagtctgaagggaaatggtgagcagaggactcctttcccaaagacagctggaacagaaataggcactccagaggttatggaatttgagagagatactcagcctctagccactcccattcaatctcccagcttagtcttctgagcattcttaatcttactattcttttcttaatgtattcaaaccaaaagacagcaatttttagagcctgaataggttttggagggaaaagtaattacgttcaacttcgattgaaactcttgcctcaagaatgaagaacagcaaaaattaaatcacagtttcttagctttttggttaaagatgtaagttaaattcttggccgggtgcggtggctaacgcctgtaatcccagcactttgggaggccaaggcgggtggatcacctgagatcaggagttcaagaccaacctggccaacatggtgaaaccccatctctactgggtgtggtggtgtgtgcctgtaatcccagctgtttgggaagctgagtcaggagaatcacttgaacccgggaggtggaggttgcagtgagccaagattgtaccactgcattccagcctgggcaacagagcaagatttcgtctcaaaaaaaaaaaaaaaaaaaaaaaaaagaattgtataaaacacacaaacaaagcaaggaaagaatgaagcaacaaagccagagatttactgaaaatgaaattatactccacagagtgggagtgggccctgagcaagtggctcaagggcctggttacagaattttctggggtttaaatacccttcagaggttttccattggttacttggtatacaccctatgtaaatgaagtagtggtctgtaatcagtctgattggttataggaggggaccaatcagaggtactttcaatttcttatctgccacagtaaaagggagggggttgcaaagggagtagcctcttgtccttttgttacttgagcatggaaagttggggttttccttttgatttcgttctaggaggtcagcatggattgaccttaggttccctgcctccagaccttattgccctgcctcatttacgttaggtttctttcttgtcaccttctaaaatattttttgttattaggaagtatgtttttgaacttccttatgcattaagtaaattagccatttatcactgtaattccttatttggaaagttgttatattcacccttaagacttcacaattctcattcatttaactaaagtgcaacatagcagacttattctttatatttagagaatttgtgtcttttgtgaagctacctgtctatagtgggaagtagattaatgaaaagtccaaatctgttggggagggttttattctactattgatgaaaggggatgtggatcgcagctagccttagaatttgggatggcactcaagtagaagtctgggaagaagttacgcagggaacaaagatgacattgttcgcagtccctgggaattcttaacagtaaagttctgtaattgagacagaattcccaaataaagtcaagagtaaaattcagatagaggagcagttatacatcagtgggaaatttggttggcagaaaaattaccaggtcatacaacttaatgatagacctgaagtcttatttaaaatgattctctaaaattgaagaattggattaagggggccttgtttggctgattttcatactttttcctcttagtctacaggttggctgcatagaagaaaaaggtagagttatttataatcttgtaaatcttggactttgagtcatctattttcttttacagtcatcgaatacttttggaaataaggtaatatatgccttttgagctgtcttgacgttcacagatataaaatattaaatatattttaattttgtgcccttgcagattgatcacttattcattagtaatttaccagagattgtggtggagttattgatgacgttacatgagccagcaaattctagtgccagtcagagcactgacctctgtgacttttcagggtatgtacattttaaacttagagaactagctctaacttcacaagtttttaaagaagtttattggttgacaccttcaatgtctatttcaatttatagacatcactctttttaaaaaattttctttaaaaatagccacctttgaattgaggtaattacctatcctcttttaccatagtctccccacagtaattactctttctaaattgaccacttggttggccaacccaataaccttttcttagtctttctgtaatatttgaacattgtgccatctgttggcccttgaaatttttttcttcatacacattattcctagttctcttctctttatctaggtcttgcctttctagatcaccttttctttttttttttgagatggagtctcactctgttgccctggctggagtgcagtggcataatctcggctcactgcaacctctgtcttccaggctcaagctatccttccttccacctcagcctctcgagtagctgggacgacagatgcacatcactgcgcctggctaattttttatatttttggtagagacggggtttcactgtgttgcccaggctggtcttgaacttctggcctcgaatgattcccccgtgttggccaaccaaagtgctgggtctacaggcatgagccgccgtacccagcctcaccttttctttattgtgcgttattatctgtacaatttaatttggatgtgaatgtctctgagttgtatatgaacatcagagttgtttccctggcttgattgtaagctacttgaaaatatgctttacttttttttttttttttttaatgtgccctactgtgctgggcatataaaatagtaataatatctgagaaagtactttcacatatgtaatttcatgctgtctaaataagtgttgattgccatgtcttaaagtactgcttttacagtactggcatagagctttgattctgatctgaagtaatactgaggctcatttattgaactgccttttaactttataagattttttaagaaaatcattataagatcatttaagattatttaagttactgagggtgaaaggtatttagataatctgatttatatatctggactgtgatatgtcatttgtgattttattgaaagtatagtttttcagtagaaaaatggtttttgaatttgggggttattaaaatctaaattttcattttggaagttcactggtctatgaacaaaactttttaaaacgatgactgtattttttcccttaactctgttagggatttggatcctgctcctaatccacctcattttccatcgcatgtgattaaagcaacatttgcctatatcagcaattgtcataaaaccaagttaaaaagcattttagaaattctttccaaaagccctgtaagtatacatgatgagtttaataatagaacattccttcttttttagctaaaaaaactttgtaaatacatcttaaagaggaaaagtaaacaaatgaaaaatttatctcataattaaaaaggaaaacattcatttacaagtttaaatggtattttacttgtcagcattaattgaaatatgttacatatgagaacagaatcttgtgacactttagtgatatattagctcagggaatatatctactttttcataggaatatactatttaattgtagtttactttctgaaaattaaataaattggcaatagtttaagatagtaattttcttaatgtaacattttgtacttgatatcaaacccaaatctaaattctgttatttagttattttaaatataaaatgtgtaggtattcaaatatttgaagaaaaaatataaagtgtatttattgtagccgagtatctaattaaacaagtttttactaaatctgtttattttctaggattcctatcagaaaattcttcttgccatatgtgagcaagcagctgaaacaaataatgtttataagaagcacagaattcttaaaatatatcacctgtttgttagtttattactgaaagatataaaaagtggcttaggaggagcttgggcctttgttcttcgagacgttatttatactttgattcactatatcaaccaaaggtaaataacatatttagaccaatatataagcagtctttctatcctgttcttcctgtttttttgctttgttttgttttgttttgagacaaagactcactctgtccgcccaggctgggtgcagtcacggctcactgcatcctcaacctcctgggttcagattatccttcctcctcaccctgccgggtagctggggctacaggagcataccaccatgcctgactaattttttgtgttttttgtagaggtggggtttcaccatattgcccagggtggtctcaaactcctgggctcaagcgaactgtcagcctcagcctcccagtgtgctgggattacaggcatgagctactatgcccaacctatcctgttcttttaattgaaagtttatatgcttctaagaggtagataccagaatgttgctttctgaattttgctttttaagatgtctattatatttacttattagtttttaaaaattgcgctacttgcctgggaaacatagcagacctcgtttctactaaaaattttttaaaaaagaaaattagggcaaggtgtggtagctcacacctataatcccagcactttgggaggttgaggtaggtagattgcttgagcccaggagttagagaccagcctgggcaacatgatgtgaaaacccatctctacaaaaattttttaaaaaataagccagggattgtggcatgcacctgtagtctcacctactccagaggctgaggtgggaggatggcttgcgctcaggaggcagaggttacaggttacagtgagcaaagattgtgccactacactccagcctgggagacagagcgagactcttgtctcaaaaaaaaaaaaaaaaaaaaaaaaaaaaagaaaattatccaagtatgatgatatgcgcctgtagttctagctacttaggaggctgaggtaggaggatggcttgagctcaagagtttgaggctgccagtgagccttgattgcaccactgcattcatgcctgggcaacagagtgagactttcactcaattaaaaaaaaaaaaaaaagcactacttctccaattctagaaatcttaagaaggatcttcaacattttaatactaatattctagctattgatggcctcaaataaatgttactatagaattggggttgttcggccgggtgtagtggctcacgcctgtaatcccagcactttgggaggctgaggcgggtggatcacaaggtcaggagatcgagaccatcctggctaacacagtgaaaccccgtgtctactaaaaatacaaaaaaattagccaggtgtggtggcaggtgcctgtagtcccagctactcaggaggctgaggcaggaaaatggccagaaccaggtaggcagatcttgcagtgagtctaattcgcaccactgcactccagcctgggcgacagagcaagactccgtctcaagaaaagaaagaaaaaacaaaaacaaaacaagaattggggttgttcaatttagcatctctgatcttttccattgattttaatgagatttctattttttaaggtcttttttattgtggtaaactatataacataaaattttttattttcgccattaaatggccagttcagtagcatcaattacatttccattgttgtgcaaccatcaccactgtctatgtccaaactttcattatctcaaactgaacctctctactcattccacaataactccacattcctcctccccactggccattgagaaactaatctattttctgtctcaatgaatttgcctattgtagatattttaatctagagttgtacaatatatgtccttttgtgtcttgccttgtgtggtcactgaaaactttgtaccttagcttgtgtttagatagtgtttgatagagatttccttggataccaagagtgttgggatgaggaagcatgagaggagaaaacttttcctagtgtttgcagattggctttatgctaggattcttcttcaacacttagccatgcttgcattgcttgggatcagccccaaatacaagcttagggtcttctctggtcttttctgagcaagagtcttatcttgagcatgtgtgtggctttctgaattccccctaatttgtgggtgcttttgaatatactaatttcccaaagaaatacgctccccagctactcctaggctttaggcagcctcttgtatgtctcaacagtaatcttttgccctatgcacctgcaggttgttggtctgccttacaaagtttcaagcaacacccatatcttttgtagctggtatgaagttaaacaaaacagagctacgcactttacatcagtccttggttccagacaggttagaatagacatatacaatagtttgcaactaatctacttagctccatgaactaccatgagccagtgtctcacaccgaggatataggccactgcttttgtgattgttgccacgctggggtaggggtgggcaaggacaagtaaagttaccacaaagctttcctgctgtttttcagttggatttttcttgattcaatattttcctgattactgtaaacctttgactattttacagaattctaacaaaattagttctgacaattttgcctgtttttcaatgtttctattaaaggatggaagcttagagctgcctattctgcattttgctgatgtgacttctctttttggcttataagccattaaaatatttatgtcaaggcatataagaattagagatgctgaacaaaaggacttctgaatgaatttatttcagagtaattttccagaacttactggttgttgttgtttttttttctccctatattaggccttcttgtatcatggatgtgtcattacgtagcttctccctttgttgtgacttattaagtcaggtttgccagacagccgtgacttactgtaaggatgctctagaaaaccatcttcatgttattgttggtacacttataccccttgtgtatgagcaggtggaggttcagaaacaggtaattttctgactcatcttcaaaatggtatttaaaatatataaagtattgttagaaggatttgagtgttttatgtttatttggtataattggtgattttattgagaatattttttgtaaaatgattggaaaaatattcttaatgaattaacctttgtaatcaattacagagcacttggtacttttgatagttttatctactgtgctgaagtagagaggtagtcaaaactagggatagcagttcgcaacgttatggtggtatttgagttactacttatataaactgtttcattaatattggcattttttttaacctcagtacccatcttgtagtagtaccttacatagttattgaattatttgaaaacacagaaactaaaagctgggtatcttagacgtaattagaacatttaatctgatctaggttaatagattttatcatttattacagtaagttttgttggcttactttaaaattatttctctccttataattttttctttttaaattatatttaggtattggacttgttgaaatacttagtgatagataacaaggataatgaaaacctctatatcacgattaagcttttagatccttttcctgaccatgttgtttttaaggatttgcgtattactcagcaaaaaatcaaatacagtagaggacccttttcactcttggaggtaataaaaatttcatcatctactattttttattagagaacatagtagtacttttcaaaaatctgtaatgctctagcagtaaaaaatggaatcttttctttaattgtgattaaaaatatatacgtaggccaggcacattggctcatgcctataatctcagcactttgggaggctgaggcaggaggattgcctgagcccaggagttcaagaccagcctgggcaacatggcgaaaccccgtctctacaaaaaattagtcgggcatggtgatatgtgcttgtagaatcagctactcaggtagctgagatggaaggatcacctgagccctggaggtcaaggctgcaataagccaagattgctccactgcattccagcctggatgacagagtgagaccctgtctcaaaaaaaaaaaaaaaaaatatatatatatatatatatatatatgtgtgtgtatataaacacatacttgtgtgtgtgtaacgtgagatctacctacttaagaaataaaaaaatgaatcttaatgtatctctttgcattgaagccaaagtataaataacaaaacttcctggtaaagatccaaattgtaagttttcaaggaatgtgatgtaaaatagttttgattttaacacataagatcctaaggtccactgatagctcaaaactaccaatggatcttttcaatgtcaatttaatgtttgtgttagagataacgtttaacttttgaaagcatattttaagttttaatctttataaacctcgaaattatgtttaggtatattcttccatacatatcttaattataatttttaaatgatagtctgtatttgactctatgtaaatataaaaacatatttaagtatgttaagatgtaaagttatactactaaagagaaatttaagcatttccttccagttgagtatgctataacaatcttgaagtctgtgttaccatgagagagtctattagaatttaaaggattaggctgggtgcagtggctcacgcctgtaatcccagtgctttggaaggctaaggcgggcagatcatctgaggtcaggagttcgagaccagcctggccaacatggcaaaaccccatctctactaaaaatacaaaattagctgggcgtggtggcacattcctgtaaatgccaccttttcaggaggctgagacattagaatcacttgaaccggggaggcggaggtagcagtgagccttgatagcgccactgcactctagccttggtgacagagcgagactctgtctaaaaaagagtattaaaacattgtagggtttgcagtggaagaaatcatttatttcttccttgattagtagtaatagagacatgagtcagtgtctataaatggcacttaactaatttttttcttttattaagttttatttcacaggcttaaccaatacgtgttaaaagcaagttacattttctcttttaggaaattaaccattttctctcagtaagtgtttatgatgcacttccattgacaagacttgaaggactaaaggatcttcgaagacaactggaactacataaagatcagatggtggacattatgagagcttctcagggtgctaattttaaatgacatgggctatttctacctgtttctttttgaaagaatattttgcaaagtcttgctcttggtttcattgtcacagacttagttcagactctcatcatttagttcagaccctcatttctcatctaactgtaaaactggtcctaactggtcttctcaccctgaactcttcctgttttattcatcctctgccagatgatttctctaaacccaaatatgatcatgtttttctactgcctaaattttttttttaagagacagagtttttttttttttttaagagtctcactctgtcacctaggctggagtgtagtggcaccatcataacttactatgaccttgaattcctgggtacaaggaattctcctgtctcagccttctgaatagctggaacaacaggcacacaccactacacctagctactttatttattttttttattttttgtagggacaggggtcccactatgttgcctaggttggtctcgaattcttggcctcaagtgatcctcctgccttagcctcacaaagcattgggattagaggtgtgagccacggcatctagccatgcttaaacatttttcatttctttttctttttttttaagacggagtttcgctcttgttgcccaggctggaatgcagtggcactatcttagctcactgcaacctccacctcctgagctcagattctcgtgcctcagccttcctagtagctaggattacaggcacctgccaccatgcctggctaattttttgtattttttttagtagagacggggtttcaccatgttggccagggtggtctcaaactcctgagctcaggcaatccgcccacctcagcctcccaaagtgctgggattacaggcatgagccaccgcggctggcccatgcttaaacatttttaacaccttccaaccatgtaaaagaaaattttaattccttagagccagacatacaagttagtcttgtcttctagtccagtttacctgaatgaaagaaatatgtctcattttaatactttagtcatatgtgttatgtgtgtctatatatatgtaagtatgtatttgtaagtttttctagcttgcttgttaatttgatttgaaatgtacattattacagtatttgggaaactttctactttgtgttttgattttcatcttcctataccaattaatttcatatttcttttttttttttgaaacgaagtctcactctgtcgcccaggttggagtgcagtggcacagtctcagctcactgcaacctccacctcctgggttcaagtgattctcctgccccagcctcccaaggagcagggattacaggtgtgtgccaccatgcccagctaattttttgtatctttagtagagacggggtttcaccatgttgtccaggctggtcttgaactcctgacctcaagtgatccatctgcctcggcctcccaaagtgctgggattacaggcgtgagccaccacgcctggcctaatttcatatttctcttgtgttgtttttactctcagtactttttaaaatgaattttagttttgactatctgagcatagagtttctaatacatttgagatatataaaatgtatgtaaatagaaacaccattatttcttgtacttgtgttcttgagtattttatgggctagagatctgccttgtgcattacagccactagccatttggctatttaaatgaagtaaaattaaatgaaatttgaagttcagttttttcattggtactgaacacatatcaagttctcagtagtacatttggtcagtagtgatcattggacagtgtagattatagacatttccatcattgcagaaagttctgtgggacagtgctggtctaaactctaaatgttagatgttaaaaagccaagcaggctcccaaagtcccttctagctttagtgttgaatgattcttgtgcttctgtttgtgattttgctaaggtgttgacttatctgcacaatttgtttaagacattttattttctctgttgtcacatattgctaatcactttcaaaagaatctgttgtattaaggaagttcagattcattccctacatattttttgagctactcatgacttaaaaccttttttaaactttatagaagttttctagtcagataatttaatatatatgcaattataaacaaaagtgttgtcttcatgctagtttaaactaatttttaaaaaattatttctagataatccgcaagatgggattatggtgaaactagttgtcaatttgttgcagttatccaagatggcaataaaccacactggtgaaaaagaagttctaggtaaactacagtcatgcgctgcgtgacatttcagtcaactgcggatcacatataggacagattataatactgtatttttactgtatgttttctgttgcctgtagtattcagtatagtaacatgctatacaggtttgtagcctaggtgtgtagtaggctataccatctaggtttgtgtaagtatattctgtgatgttcacgcaatgacagaattgcccaatgacacatttctcagaacatatctgtgtcattaagcaaagcatgattgtattggcggaatgaatgtgagttatgcggtggtcatctttattatatgagtggttatctttattatatcttcaaaataagtgagggtttgtcatttgggatattggggaaatatgagatgctagctaagttacatgcctatttaattaaaatgtccctaaaaaggccccttttgtacttttcttccttaaatattcatataaaatgaaaagttagagatttacatatgtgtataacttaatttgaaaatgccttgtaaatatttaggaaagtcagaaatacttgtttttagagttaagttgcaaataaattgactgccgatatattttataaatacattataactgacaggtactcagtgtcttttgttatgtagcagacataagaatgaagacttggagggctagattaaacttaaataattaaaaaccattcaagtcctttcctacagccatttgaggggaaacctaatgtaaaataagaagccaacatcatctctagtttaggtgtttagatttagtgaccacgggatggagaaatcacctggttaaagtcagcttgaagctctcgtgatggtttttgtttctaattagaaaaataggaataagtagtgtttcacagattctactatctttcttcaacagccttaacttctcattaggagcctaatatctacagtacttccttttttgtagattttaaaaaattgagatatatcctaatatagaaaagtatacagatcaaaaatatctagcttgaagaatgtttgcagagtacgcttgtacatgtagcacccagactaaaaaacagaatcttaccagaactgtagaagttttctttaaccaacatacttacctccttgtccatagtggcactgcttttatggacagacctgatttacaacagaagccctaagtggctttcctgtgtagcataaaattaatgtggtttgttctcacagctttccccctaagatcaggaatgagacaaggctgtccactttcactactgctgttcaacagtgtactggaagttctagccagagcaattaaacaagaaaaagaaattaaaagcatgccaattagaaaggaagtaaaactatctgtatttacagacgacatgatcttatgtatggaaaatcccagagaatccacaagaaagctactgtagtgctaataaatgaatttagcaaagttgcagggtacaagatcaacacataattagtggtgtttgtatatactagcagtgcacaatccagaaagaattagaaaagcaattccatttacgatagcatctaaaagaaataaatagccaggaataaatttaatcaaagaggtgaaaaacttatatacattctgtttgttagacgtgagtcactaagtacagaccacactcaacgggagggaagttaggctctaccctttgaaagaagggctctcaaaaaatttgtgaacatattttagtaaataccatcatgatggaaagagcacgaagagccctctgggttgctgaaaatgtcctgtcttcatctggttagggagaacacaggcagaaaaaaatgtgtatttgtatgtataaattttcattgaactgtgtgtttaagattatggaatttgtgtgatacctcaacaaaaattttaacagttttaaggttgattctctctctctttttttttttttcttttgtcacccaggctagagtgcagtggtgccatcttggctcactgcagcctccgcctcctgggttcaagtgattctcctgcctcagcctcctgagtagctgggattacgggcctgcgccaccacgcctggctaattttgtatttttagtaaagatggggctttaccatgttggccaggctggtctcgaactcctgacctcaggtgatccgcccgcctctgtctcccaaagtgctgggattacagtcgtgagccaccgcactcggccttaaggttaattcttgaagtacagaaaaacagcattatagttttgaaattagaaaatttcagttttatgtatgatctcttacctatgactctactgaaatagaatttctatatgtagaggctgttggaagctgcttgggagaagtgggtcctatagatttctctaccatagctatacaacatagtaaagatgcatcttataccaaggcccttaagttatttgaagataaagaacttcagtggaccttcataatgctgacctacctgaataacacactggtagaagattggtgagtatttattgataccttatatgtaatctcaatatgacattcatggagaatgatacttcacacaaatagatattctcagtaactaaagctttgtccttttttaaatctcagtgtctttatgaaaattcttatatttttattaattcacataattatttaccctactatgtgccagacacttgatataatggtgaacattccagacaaggtccctgttaaaattttagtgggactagacaaataaacgataaataagaaaaatgccagatggttctacacagaaaattaagataggggaatataaagggagatgttttaggctcttgtcagtatcagaggtgccactctcctctaagcgaggccttattttgatccttttaaaataagtcgtaaagcagagaggttgttttataatcctagaagtcttaagctaatcagacagggtcttctattacttattctctgtgcaaagcagaattgcaccacatatcaaaatttcaactggttggttgagattacttttgcgtgcatgctctttctctctcttatttatttgttgattgattgattggtatctttgagtactccatcaccaccatatttgatggtagcctcaaagggttttcctcacaaccaggcacctttctaagataaatacgtgttttgatttttttctgtacttcccttcctccttctcttgaggaataaatgattggcaataatgtctaactgccatgtttccgttattgatttaatgtacctgtatatttctttcttttgttgttgtttttgtttcattaaacaaatttgtatggtttctttccaaacattttattataaaaagtttcaaacatacagcacaatggaaataattttatagtaaacacccatatgcttatcatatagtatctatattttatgctgtccttgcttaatcacttctagccatccgtctatccttgtgttaacatgtattaattcatctctctcttttttttttttttttttttttgagacagggtctcgctctatcacccaggctggagcgcagtggcatgataatacatcatagatcatagctgactgtaaccccaaattcttgggctcaagcagtcctcctgcctcagcctcctaatgtgcaaagtttatgtgcttgagccacaccacactcagccagttcatctcattttttaaatgtatatcaaggtatatcaagcacagtttttgaagagagtgccacagaaaatttgcgagcattaaatgtttcattcatttcatagtaattcgaaattggtttttctgaaacagatgcacagaaatattagtgtgacttcaacttaagaatactaggaagcaggtacaagttttttgtatttttctttaacagggaaaaactttagatcttcaagggactttagcatatgaagatgtggacaaaaggattcccagaatttttattacttatatgtattagaacatattattttcaagtatttcttgagtctttttaatttatagtagtcacaattaaactgtattgaatgaagggaattgcagttgcagtgattagtaattcaagtttactgaatgactagtgaaagtcctttgatacttttatttgatattggagaattttgtaaatgtaaagtttcctaatacaaattttaaattttagttttgaaattttttcagtggaggttaacattcatcaagattaataactggtgtacttgataggcatttgaattgtttttttcagtgtcaaagttcgatcagcagctgttacctgtttgaaaaacattttagccacaaagactggacatagtttctgggagatttataagatgacaacagatccaatgctggcctatctacagccttttagaacatcaagaaaaaaggtctcttaagtaataaatgtttattgaatacccagcatatctaaaacagttctgtttgctgtgggtcatgactgttaaattgcttgaaatagtattgtactaactattaacctttcctataagtaatttaagccatatttcataaatccagggaatgtgttatttttaatttattatggcagtgtggaaaagctcagataggtaacctgaggaaatagtagttgatttttgggggaggggaaattcttaaagacagaccttgtttttttagaaatagaaagcgctactttgctcccatgaaagctgttagctctgggtatggtttatagttattgtgatccacaagtgtttatttccatgtcaagttaacatatcacaatcccctggtgaaatataggaagacccatagatttctccctttttccatgttgatatcgtaataaggttccactgtaagtattctgtgaagcatgtttaagaacacttgttccttccttagtctaagcattcctctttactatcttcttttcataaagtgactgagaaatacacagtttagttttcaccaatttaatttcagggcagaaacccaacattgaagcagtactttcagtgcatcataaatataattttagtgttagtaaaattactggtaatataaactgttaatgaaactaataatataacctggaaggcattataattctaacattttaaaatctcatttcattttgaaatcaagtctctgtggtagatgtggtctagttttgttcaagagacagatgagtcagagtttgtgatttgtgtaatatgctactaatgagtgacagagctgagagtagaacctaatttttctgctgcctaaagcagcagtttttgccataccactctgcctcttgtataaacataaatgttttcatcttaaaaggtaaacattgcctccagatttagttttaactgtatttagctttattcagaaagatttgttatactcattttgtgtaggaaaggtacaatgatttccacttctcttatttacattttctaatccctttctttctagtttttagaagtacccagatttgacaaagaaaacccttttgaaggcctggatgatataaatctgtggattcctctaagtgaaaatcatgacatttggataaagacactgacttgtgcttttttggacagtggaggcacaaaatgtgaaattcttcaattattaaagccaatgtgtgaagtaagaagattaattagtctgatataattccttgtttatgacctgtttatctaaagagtgctgtgatactgcacatcatcttcacataatatcacccccactcaaactgttgtaaatttattaaagtgagcatccgtatttagtcataactttatgcattaggtttcagcttcgggatagcaacatactagaggagttctaaggggtgccttgaataatttgttactaatgatagttaaaatactgctgattataaattatttgcattaaccaagagcctgttctaactttgtttacgtcttctgataagagcacctttattttccctgatatgctttcttgaataagaaaaaggagtggggcagcaatcagcatagcttttttatttttgaggatatagtacaatttatctcaacgaagagtaaaggtacataccaaatgaaacaaagtttgtactcttccatcaaatgtgtaatctaaaacagcatactatgatgctctaagatttacagagttaatttatagcactgtcaaatgtgattcaacagaaatgtgaaaatacaacatctgatgaggtcaaacatctgctgattacagataactgatagagaagtattttcgtaatgtactcacattgaaagcaatgtaagaagcagttcttattttctacagaaaaagtagtgacagtgaataaaacatcaccttctctgcaatactacaccgcactcataccaattcagcagagtggtaccctgaacacacatacagcttatttctcattagtgaacaaagctaagatttttataaagttttacctttgagccagaaaataaaatgttccaaatatacatatgtacacaccccatttgtggtactttaaattctctagctctaaaactggtgttttgccttgtctttggtttgaaaaagaaaaagggtgcaattagtaatctataacctgtcttatgtgtgtgaagtatgatgaatatgatggatatggagtgtaatgattcattcatatgttaaatatggagtgcggtgaatagcaaaagtaaagctgaatactgttttaatgtgccagatgtattggagcacttttctgctctttggaatataccacaaataattacccaaattttatgcccagaagttgggcttattaaaaaataaacatttttaacatgactgttgtagttcttcactgaggttagaaaatgcataaaaatcagatttccaacttttgtcttaaacttttgatacctttttccctcttctatcatatcagaaaactccttctgttactaacgcttttcaactctgaaattgtatttaaagtggtgatataatttcatttgtaagcaatattctgtttcattatggtaatggcctagactggaaataaacagttacagtgtcactaacatatatatttgatattgatatactagcctagtgtggttttttaaacaccacctaatacatgttttttgtttgtttttttagcagtatgttgagtttatggcagattaatctatcatcttttagaaatttaatatgtcaacggggcatgaaaattttaagtaaaatgtattaattttactcatttttactcaaactattgggtggatttgtttgtatattctaggtgaaaactgacttttgtcagactgtacttccatacttgattcatgatattttactccaagatacaaatgaatcatggagaaatctgctttctacacatgttcagggatttttcaccagctgtcttcgacacttctcgcaaacgagccgatccacaacccctgcaaacttggattcaggtattctattaaatttttaacattaatactgtaaactcagttctagagaaagatggatttaagatggaatcccactaaaagcactttacaggattaaatctataacctctaaatttgtttcttcatctatggaatggagataaaagttgccaacagttgcaacaagttttcaatgaaataatgtgtgtaaagtgcctaggatagtacttgatgtatagtattccctcagtacattttggctattgataatgggtcaactaattgagctttcaatatgtgtcaggcactgtgcttgcactggcaatattaatgtgaaaaagaaacacccacattctagcaatggaaaaaacaaacacaatcagatattttaggtactgtggtgcagatacgatagaattttcatattttcagagctctggccaactcaatttaaaaagcagcctttggccgggcacagtggctcacgcctgtaatgccagcactttgggatgccaaggttggtggatcacttcaggtcaggagttcaagaccagcctggccaacgtggtgaaaccccgtccctactaaaaatacaaaaattagccgggcatggtggcaggcgcctataattgcagctacttgggaggctgaggcaggagaatcacttgaactcaggaggtagaggctcctgaggctcactagccaagattacaccactgcattccagactgaacgacacagcgagactgtctaaaaaaagaaaaaaaaccctttgtataactataattaacatttagtgtatatccttctaattgtttaaaacaaaaattgaactgtactttatttactcttataacctactttccttctatgacatataatgggtatttctcatgccaagagcataatagcaaaagaaattccaccaagggttgggtatgtataatacatatatgcatgcttgaaggctcattatgggtcagttttttaaacctaaattttataaaaggatacaaaattcacagatctttattgttaactgtctttattatatattattaatgtgttttatatgcaaacataaagctaggtgcaaattcacttgttgtacttaaagaccaatcaattctaatacaaatgttgatttaatgtgatattttgccacaactaatctgctcctcccaatccttccagtcacttcagcaaaggttgtgattactcagttcttccaattgtttcttttagttttactgctacaaccttcatttgacatgactctaatgtcatttagacttcagtttgctatgctttatattttatgtattttattttctgttggctaacagcaattacaaatctactatttggaaaaatataaattataaacatagacatagatgcccatcctgtgatcctactagattataggctgttctctaaatgatctagaatgtgcttatatgaattttccttaggccactgaaatgaaaatcctaaaataaaaattctcatagaggctttgtaaactatctaaaatgtatctcttatctttaattgggaaaatacaggtataagtgatttaagcatttaaaactttaatatgtaatttacagtactattaaaaacaatttttattacatagtttaaggtaatcattgtttatgataatctggtaatttgttatcatgaacatggccaagacttttttcatgtttatcacttatgtatttatgtcacaaccattggaaggtaaagtaactgttttattttatctgtatacagtgccaatatttttattaccttaagtgaaaatttaaacttcacatataaaattctgttattgaaaaggaaatacatatttttgtaaaatttaaatggtgtatcttttctgatggctataagcctcattgccttcactaaacgtcccatgtgcatctcaaactcagctgtccaaaagcaaacgtgtcatcttcttcatcccttcccccagcctacttttttaaatgtgtacctttttgacaaatggcactcagttgcttactctagaaacctctctcacgtatttcatctgattaccaaatcttgccaattccatattatgaataacttagtccatttgtttctctctgcccttagcatccttactgctttctagctccatgatttagcacagttgaaattctttcattaaattttccaagttatttcttgcttccagccatctcagatattattattattgcctgtagcactatcctttcctgctctgatgactattactcttctttcagatatcactttttcttttttcttttttttttttctttttttctcttgagacagagtctcgctgtgtcacccaggctggagtgcagtggtgcaatctcggctcactgcaacctctgcccctcaggatcaagcaattcccgtgcctcagcctcctgaatagctgggattacagatgtgtgccagcatgccctgctaatttttgtgtttttaatagagatagggtttcaccatgttggccaggctggtctcaaacttggcctcaagtgatccgtccgcatcagcctcccaaagtgctgggattacaggcatgagccattgcacttggccagtatcactttttctatgaaacttttcttgtctaggtgaggttccctctgctaagcttctgtagcattttaaactttcctattataacacttatcatattgtgttgtaatgtcccaggctagtcagtgagttctgtgtggtctgacatgatctgtcttgttcatgcttatatactgaggacctagcacataaaagatcttattgaatcaattaattagtcctcctttgaaataaaatataaattacaatgtaagttctcactttttttaagataacagtttcttttaaaagcaaaagaaatcctattaaattccttcagaaccaattttgtgttaggtactgcccaccagaaccttatagcatagtgggagacagacacataaacaagaaggaagaaggtgtgtaagcaagaatgcctgggactgaggggagatatttttgtttgtcagagtcagagcactttttccgatgctgtttggataaaaaatcacaaagaacaatgcttgctgttgtggactacatgagaagacaaaagaggtaatgtaatgagtgttgcttcttacgtttaggatctagagtgtaacttgttaactatcggctgaattttaacatgattattttaggtgaaggtgttgcaaagtgttatatttaatttgtgtgatatttatatctccttgcagtaatccatattcaggatagcagtttggttaaatcagtgtcaagaactctcaattctagtaccagctgtaccagtaaccatgttacctttgttaaattatgcagccttcttggctccaatttatttcatctatgttagggataggagcaagtgtttttccaagttacatttagctgtattacccctctttttacttttctctttgctttagttctaagaagtaaatagagttgtgtaaatgtcttctttatgtatctttattttaagatgtaagtttctttactgtgtgcagtggtctcaaaatctgtggcaatactgtgctgtgacaatgtttattttcttgtttctggtaaattgttttatagtatagtatctttgttcctgttatttctcatgagatttttaacagtgcatacagaaattgctagaatggatggtctgactgatgagtactgcttgagagttgaccagaactctgaagaaatagtgtagtaggcctataatttgaataggtaggaatcgatgtctcataagtgtgtatggtggtggtaggggtggttggtaaagaatgagagggagaggtgagtgaaaaatgaaatgtttttaagcctaaatgcattaatatcttaaaaaattaattcctatgtagtcttaaaccattcttcttctctagtagaaaaagaagttttatgcttttcagtgtctttgcttctggttattttaccttagagttttataccagattatcttctgaggaggcctatcagaagctttaatgtagtggagagcatttgttttcttggtgttgggaggcagttttacctttgagtcattcatttcagacttaccattggggtagaatggtgttgacattagcaggagttggagaagataaaaattcttcatattccattttaatgctgaataagatcctgaagaatattcctggagaaagtatgaatgggatatagaaaaacgggtaaagacatgcattcaagtccaagcttgtgctgtgtaaaaattacttgttatcctgtacagtatgttgggcaaaaacaaagaacaacaataaaacaacaacaacaaaaaaattgcttgctgtctttgaacctcagtcttatcatctttcaaaatcagaataatgtctgtagtgtcttcctttccatggggaaattatttcacttctctgaacttaacattcatcggaaaattaactttagttgagtgcttgctgtgtagtagggtgtgccttattcatcagctttgcaggcattatttaattgttgcacccattctccaaggtccatgttgttccagcatttgcaagtaaggaaactaggaaactgaggtttaagaagttaagttgctgaagatcacacagctggtagtaggcaatatagctagatttgaacctacctgtattgtacttcaacactagtgctcttaagcactaccatgtcccatctctacaatgctagttttgaaaaagatactatctatggtccctttcaatcttgacctacctattaacacagtggaagatttttattaagtaactcaacctaggcaatacattaaggagaaaataagtcacaataggaaagacatgtatttgtgtcttagatgaaacaatattttttattaaattgactgttttaaagtgtgtgttggggggtgcttgtgtgcatttgtattagctattctgtgtatcctattcttagtctgtggtacatggatttcttggtagagagcagatatgaaccccaattttgtatcaggtgatagtctacaggttttatcagattctctgataggtttgagggaaaaaagaaaaaccaaaaagattaattaaataggactcttcagccatgttatcttataatgtttataggtatatattggggaaatgtggtttttgggaatttgtaattttctgttaagcagtcactaccattgtattctatatcaacatgcttttattttgatattgaagtttaaaaaagtgaatgacattatatctcatttttctttagaccttcttcaggaacaatttttaatgatgctttctggctggatttaaattatctagaagttgccaaggtagctcagtcttgtgctgctcactttacagctttactctatgcagaaatctatgcagataagaaaagtatggatgatcaagagaaaaggtaatggaatttagaatttttggtttttaaaattaatgttggcattgtctcaataagggtatatagtaaagatttattttgcctcctgttccccatttaaaagatattttagatagaaattttgttttaaagtgaaattataataaatttttaaaaaggaatatgtaattcctgttctgaaataataggaatgcttattacttaggtattataaaaatttaacagatagcaaattcctataggacagagtccatacttaattttctgtatattccccataatagccctagcattgagaacttaatttaagggtgataaatatttttcaaatgattaaattatttcctaacttcagtcagattagatttaccactaatttctaaactattcaagattcattttggatataaaatatccaaaattataatccaaaatggctataatgtgactgatttatttctgtgactaattaagtttcatttctttatctacctatatttctagtgaatttaattcgctttcctctgactgagttagaactgtcataagaatctaataaatatactcctagatcatggggaagaacaaaaaataagaaagtaagagtaaaaaataaagtaaaacactttattatcccaactgctcttttcaaatgtttgttcgtttgaaatggcctgggtctcattatttcgcccaggctgtggtgcagtggtgcgatcatagctcactgtagccttgatcttccgggctcaagtgatcctcctgcctcagcctccaagtagctgggactataggcacacaccactgcatccaactcattttttttaatttttatttttaatagagacaagatcttgctatgttgctcaggctggtcccaagctcctacgttcaagcagtcctcccacctcagcctttcaaagtgctgggattacaagcatgagccgctgcacctggtcccaaattgttttttaaagcggttatacccatttgtgtacagaaatgtagttgataaggaagtggatcggtaggaagccttatatttgaagaagggtgccaaagtataactgttcctagtttagttaaaaaagtaaagaaggttgggcacagtggctcacgcatgtaatcccagcactttgggaggccaaagtgagaggattacttgtgaccaggagactgagaccagcttgggcaacatagtgagacctcagctctactaaaaataaaaataaatcagctgggcatagtggcctgcacatgtagtcccagcaactcaggaggctgagggaggaggatcgcttgagcccaggagggagaggctgcagtgagccatgattgtgccactgcactccagcctaggcgacagagcgagaccctatctcataaacaaaaaaaaaaaaattaagaaactggaatatgtatataggtaaatattagaggcagtatcacttatgatagtatttattttatgtactagattattactgttatagacaccacagctgtcatggttttagaattgaagttacttacagaactgaatgttatatgtataaaatgcataaagttaaggccttgaagtaggcaaatctgagttctaatcctgactgtcaaactttctagttttatagtcttggtttaagtggatcctactgatctacttccttttcaatagttaatatcagatgtcttaaatttatatctgttaagtattaaattctgtcttattgtggtctttatttgtgtgtctgtaattattgattgggttgaatttcaggtgaaaccactgacagagtatatagtacctgaattggatggcatctgctctatttttaaacaatccaatctctttataaataatcatatttttgcatataggcttcccatatgtagattattcttaaaatataattttcattcacaaattccttttccatcctaggtataaatggtattatgttttaaagtataagtgatttattctgttttgtttgccaccttcattagtttttttctgtcaaagtctatagtatatgtattcaggagcttccaaatagtatgttctcattaaaagaggtgttcttgtgacaaacagaagtcttgcatttgaagaaggaagccagagtacaactatttctagcttgagtgaaaaaagtaaagaagaaactggaataagtttacaggtaaatattagaggctctattatttatgacagtatttatctcatactttgggttattttgttatagacactgtacagatgccatgtgatttttaaactgaatttacttactggactaagcatcatatatataaaattatggtctgaagcttaagccttagagtagacagacttgagttctaatactgactctgccacttcttgagttccttatctgaaagacgaaggtaaaaccacctgtctcagagtttatgccatgcattttctgccatagcaccctgttcatttcctttatagcacttagggtttataattatatatttatttgtttgcttgtttattgtatgttacagaagaagcagattgcctcttctataaatttcttgatatccattcttaaattggctcatgttactgtctgggatgcttgccgaatttctttggtcaactcattcctccacaatgacaatttcagcttctccattctgcttaaacctctcatcttctcttctatgccgctgctttcagcctgcctcctacttggagaaaatagaaggcatagagaggaaatctcgccacatcccactctcaaacattgaaatctcctggcatctcctcctttaataatcttccgtcatgttacagaaacagtttatccttctatttgagactaattcttcctgtgctttgtttttttatctgctctttctcaggtgctttattttttaatatgctgttctccctctgaactatgttctgaacattttaaaacctctcctgtttaaaaattccctttctcacaaagacaaaataatttccctcttccctatgttctcttttaggtatcaccctctctcttccttcctctcacagacaaactttgtgaaagagttgtccatatttgctgtctgcatttcccccccttccatttattccagtaaaatagcacttgctaatgtctctcataaacttcatgttgctaagtctggtggtcacctttcattcttccttttccttaatgttttattaatacttcacatcatcaaccatgccttgcttgaactgtgttctgtttacctttttgatccactctcctgatttttctcctttcacttttgccttcttcataggctcctcctctctactgagtttttggaatatcgtgtgtgtactaagcactgtgctaagcatgggtactgaacttttctactctgaggacttgatttcacgttatgaatagaaacatttgagttggaactatagaattatgccaatataaatgaatttgtgtgtagaaaatatttcacagagcaagcaccatataggcagttcaattgcttgatcaattttctatgcagtatagttcctagttttttctattttattttttttatgttttcatttttatttaactgagattgttttaaacagaatatatcttttctgtgtaaattttacaacaaagatttcagtaaccaaactactttatccatatcaaattttaccaattccaatacagttttgtgctatttttcaaagaaaaatccacgacctttattcttaccaaattgagttttcaagagtcagactttgtaggactgtattttctaatgtacagtttttttgtttttttttccagacaggatctggctctgttgcccaggctggagtgcagtggtgcagtcataacacactgcaagctctgcctcccaggctcaagccatcctccaacctcagcctcacaagtagctgggactacaggcatgccccaccatctccagctaatttttgtagagatgggtttagccatgttgcccaggccgatcttgaattcctgagctcaagcagtctgcctgccttggctacccaaagtactgggattaaagatgtgagccactgcacccagcccatgtacagttttaggtgttgacaagattgtttggttttgtttgtgtgatttttttttttttatgtgatataagcctggtaggtcggtacttatttcttatctaattcatgaaattgtaggcaattcttctcgggtagactacagtcctcctgttgtctaggaccagtctactgtgttgctgatccaaatcattagtatatacagttgacccttgaacagtgtaagggttagaggtgctaaccccctgtgctattaaaaatcagggtaaaactaaattagtagtcaaaagttaactactaatagtctactgttgaccagaagccctaccgatgatataaacaacacaattttgtatatgtattatatactgtattcttaaataaagtagcttgagaaaagaaaatgttattgagaaaatgataaggaagagaaaatgcatttacagaactgtactgtgtttatcaataccgtaagtttatatcatctgtttacaaagaatcatctgtctgaaattgtaggcaaccactgctggttgatatgtactttaggcctcaatctacagaatgtatcaaacaattcacctttttcttgtaatggcatgacttttctctgcatcttggaagcacctccagccactgtggtgttaatcaaggcttatagtattgcagtaaacacagtgaaaaaatacatgagaacctggagagattacttttcatttctggatacaatttactagagaaatgaactgctcatgtggaaattattagtgtcacatggcattttaagcagatactcacaacacaataatgcttaccacagtagcaactgaggtagctgcaaaattattacaatagtacaatatgtacgatagttaatcttatgcaattatgatttaatactgcatctttacatttgtttatatttgtcttaaccacaaataatgctgtgtacagtgtgtgtgtgtaagttttgataaattttaactctttgtaatagatttgtgtatattttatggtagtaaatgatgaaatgtatcatatcaaatgtatacaaatgatggaatgtgtagactagttgtacatttattttatgcattcatgacataacttttaaaaaatttttcagtagttctaaactgtgtggtttgtgaattttttcaaattgtggcaaacctccaaaaagttttcaatatatttattgaaaaaaaaatccacatataagttgtcctgcacagttcaaactcgtgttgtttgaactgtatttcagaactgtatttcagaatcattacattttatttctataacataacatttagagttgggagttacatattggtaatgatacaatttaaaatttgctaaatttatagaccgattttttttccttcttcaatttttgttgtttccatgttttcaggatcttctcttagaaatctacagaagtataggggagccagatagtttgtatggctgtggtggagggaagatgttacaacccattactaggtaaattgcatttttctaaacaacggtatagtaattctgtttatgaaggagttatgtgtgtgtaaaacccaaagctattttcacaatcttttcttatagactacgaacatatgaacacgaagcaatgtggggcaaagccctagtaacatatgacctcgaaacagcaatcccctcatcaacacgccaggcaggaatcattcaggtacattttttcccagatttggtaaagccatcactagtgtagtgctgaggttatttcagtatgttggtggatatttacacagccagataaactctagagataagactagaacttatctgtttttcagaggattaggctaaacattcagggatactcctgaagcagagggatgcaaaaaaaagagaaaaaattcagggagacacaggaaagtcagacaggtcattgacctaaaagatagtgtagatttcttgatcatagtgttgttggataacaacagaagacattgctcgagcatatacaatgtgccaggtagtgtacttactgcttcacatggaaaatcttatgtaaactatttctcatagtttgcaacagagttggtcccagaacctgttgtttctattactggctaatactccttagccattcttccatgaaatattagagccctttgagctctatttttgtgttttttgggaaacattaaacgatattttgggattaaaaaaatgtttttggccaggcgtggtggcttgcgcctgtaatcccagcactttgggaggccgaggcgagcagatcacgaggtcaggaggtccagaccatcctggctaacacggtgaaaccccgtctctactaaaaatacaaaaaaaaaaaaaaaaaaaaaaattagccgggtgtggtggcgggtgcctgtaggcccagctacttgggaggctgaggcaggagaatggcgtgaacctgggaggcagaggttgcagtgagccgagatcgcgccactgcactccagcctgggcaatagagcgagactccatctcaaaaataaataaataaataaattttagagataaggtgtcaccctgttactgatgctggagtgcattagcgtgatcatagttcactgcagccttgacctccctggctcaagggcacctctcgcttcagccacccaagtagctggggctacaggtacacactaccatacccagctattttaaaaaaaaaaaaaaattgtagagacaggtcttggtttgttgtccaggctggtctcaaactcctgggctcaagtgatcctcctgcctcagcctcccaaagtgctgagattacaggcatgagccaccacacccagctgatattttgggattttaaatgatattgtgaactaaaatttgtctaagttaatttgtatctttgctgtttttttctctggttttctgttgatatctttgattacttaacttaaaaacaaaataactcctgtttaggccttgcagaatttgggactctgccatattctttccgtctatttaaaaggattggattatgaaaataaagactggtgtcctgaactagaagaacttcattaccaagcagcatggaggaatatgcagtgggaccattgcacttccgtcaggtaagaaatttgacttgatttttttttttttgcctctctcctcattctaaacaacaactgtttttctcttctatgaatataacaggagttgttttatatatatatatatatatatatatatatatatatatacacacacacacacacacacactatatatatatacataccatatatatagtgtgtatgtgtgtatatatatataaaaaaatatatagtagatgttgcaagctatagatagccctaaatccttcagtaagatagcaataagcagttaatgcacctaggcttgaattttactctcttattccattaggacaacttcaccccacccctaaatatttctaaaaacagaaatatgaaaagggttttcgaaatgagtatcatctcgcatagtttgttggactgaggcatgccaagaaaagtataggcattcctctttctacttcctgctacaaacattttagtcagtaagatagcacttatattggctggaggatccacaaaggactgcttatctttatttatgaaatattttcttttattaaaaaataatacggccaggcacggtggctcatgcctataatcctagcactttgggaggccaaggcgggtggatcgcctgagctcaggagtttgagaccagcctgggaaacacggtgaaaccctttctctactaaaatacaaaaaattagccaggcgtggcagcatgcgcctgtagtcccagctacttgggagcctgaggcaggagaattgctagaacacgggagacggaggttgcagtgagctgagatagcaccactgcactccagcctggacaacagagcgagactctgtctctaaaaaaataaataaaataaaaaaaataatatgcctactcagggctgggcacagtgtggtggctcacacctgtaatcccagcacttggagagctgaggcagatggatcacttgagatcaggagtttgagaccagccgggccaacatggtgaaactccatctctactaaaaatgcaaaaattagctgggtgtgctggagcatgcctgtaatccaagctactcgggaggctgaggcaggagaatgcttgaacttgggaagcagaggttgcagtgagccaagattgcaccactgcaccccagcctgggcgacagagtgagactctgtctcaaaaaaacaaaaaaaacactcagttacccaggaagataacatttataatctgtatataaggtcaccatgttttctgaatgaaaagccaagcacctaatctaataaaggatttcatatttatgtaaagttttttgataatgtaaaccctaaaaaattaattatgtttaagtatgttttgttgcctttgtagaaaaaaaaaattattggccgagcgcggtggctcatgcctataatcccagcactttggaaggctgaggagggtggatcacatgaggttaggaattcaagacaagcttgggcaacatggtgaaaccccatctctacaaaaaaatacaaaagttagctgggcaaggtagcatgcatctgtagtcccagctgcttgggaggctgaggtgaggggatcccttgagcccaggaggtggaggttgcagtgagccgagatcatgccactgcactccatcctaggcaacagagtgagactctgtctcaaaaaataataattattggaatgcctttcaaatatttcagactgtaagactgctataaaattagagatatatcctcatattttaaaaaccttttcctgtgcgagttgattcttgcttgcctctgtaaatcaatatatactattcttctccttcctcttgtatttcagctacacagacctctctgtgttttcttgtcaggccaagctgtttctatccaagggccttagatgtatcttctccttttcccccagttaccatgcgggtggcttcttttcattcggaccctagttaaataataatgtatcttcagagaggcctttcttgattacccattctataatagccatctagccattttgttttgttaccctgttttaattctctgcatgtcccttgttactttccaatacttatttattgtctgttcctccaaaccagcacataaattccatgagagtaaagacctgatctgacttgtccacttgtgaattccccttgtgcctagtgcctggcacataataggtatttattgaataaataaatgaaagtagagcatatttagaaccaggcagagtatctgagtaatttcctttttttctgcttaaagaatttaaatgactcataaaatttgtatttcttaccaaaaattctagaaatgcattttttagaatggagaaatgttaatttaaaaattttgtcctttggtgaagctatttatacatgtatatcttagggttctgtttttaagtatatttttttctttgacttatctcacagcaaagaagtagaaggaaccagttaccatgaatcattgtacaatgctctacaatctctaagagacagagaattctctacattttatgaaagtctcaaatatgccaggtattatgaaaagacaaagttactgtattttaacatttaatgtcatggcttcttttctgaaaacttgagaaacaattttaatgtaaggatttgcattgatgaagagataaagacttggtggctgtgatcagatgtttccttgtaattctctgccctccttcaaaacaaattgtttctgggattccaggttcattctttaccctgacccttcaagaaagttttggtgattccctctttgttctcttcctatacaagtatcctgagaattatatcttgtctcttttggtaattgtatggcatttagtgttctaatttataaaattgtaactcacggttaatacttacaaacttgttttgaggcacaaatgtgatgaggcatgaggaaataattataatggggtaaacaaatgcagcatttttaaagccgtagtgacttaataaatcctatgtttatcacagaaataaaatttactatcatttaagtgcctatgatatgctagccactgttagactcttttcatatgtattctctaatcatgacaataactatggatgtgaaaaaaggcttagagaagtccagtaacatgcccaaagttacacagctataagtgacagaactgcaatttagatctaggtctgtgtgattccaaggtttacagttgatccttgaaccacttggaggttaggagtgctgagcccctcctcctcacacatttgaaaatgtgagtattactttgactcctcaaaagcttaactactaatagcttactgttaaccagaagccttaccaataacataagcagtagattaacacatattttgtataagtattataataccatattcttacaataaagtaagctagagaaaagaaaatgttattgaaaattataaggaagagaacatatatttactagtaagtggaagtgggtcatcataaaggtcttcatccttgccaccttcatgttgagtaggataaggaggaagggttggtcttgctatctcaggggtggcaaggtgggagaaactctgagtgtaagtggaccatgcatttaaatttgtgttgttcaagggtcagttgtattttgtttccactgctattttgtattcactgttgcttgttagtattattagatcagtagcaaagcctatgatgagaactctttaacaacaaatttaaacatttatttccctgaaaacctcttctttattttcagagtgtcttttcttttttgctactagagtaaaagaagtggaagagatgtgtaagcgcagccttgagtctgtgtattcgctctatcccacacttagcaggttgcaggccattggagagctggaaagcattggggagcttttctcaaggtatgtaattcgtatgactttgttatcctaaagtgcagcttttctgttaccaatagtgactttaaaaaataaaaactataggccgggcacggtggctcatgcctgtaatcctagcactttagaaggctgaagtgggtggatcacttgaggtcaggagttcaagaccagcctggccaacatggtgaaaccctatctctactaaaaatacaaaaattagccaggtatggtggtgggcgcctgtaatctcagctattcaggaggctgaggcaggaaaattgcttgaacccagcacaacaggcagaggttgtggtgagccgagattgcgccatggattccagcctgggcaacagagcgagactctgtctcaaaaaaaaaaaaaactatgtagagaccaaatgtgtgtgtttctttccttttatcaagatataagttgattagccctagtgaattgtgcttttattaaacattttccaaaatagtcattgtaaaaatttaagttttaaaaattcagcttaagtgtgcttttctctttataactttttccctggcctaccaagataaaattgtttcctcatgtttttgcatagcatgataacactccattcagttttagcactacattgtattactgtcattttatctctgccttgctaaactagaagctcccttaaaagtgggaaccattctattgtttattgttgtatacctagtgtttttgttttgttttcttttttttctttttatgtttttttgagaccaagtctcgctctgttgcccaggctggagtgtcatggtataatctcagctcactgcagtctccacctcccaggttcaagcgattctcctgcctcagcctcccgagtagctgggattataggtgccccgacaatgcctggctaatttttctacttttaatagagacggggtttcgccttgttggtcagcctggcctcgaactcctgacctcaggtgatccacccgcttcagcctcccaaagtgctgggattgcaggcgttagccaccatgcccggcccccaatgttttctcttctggtgactgataattatgtttagtaaacattcagtggatagtggatgtcagttaatttgtaaaaggtgttcagaaggaattgcttcttataatggtgagagggaaatgatccagggattttggaagatgaaatagtatagttactcaggatgctgtagatctaaattctttccttttatcaagatataagttgattagccctagagaattgtgcttttattaaacattttccaaaatagtcactgtaaaaattcaagtttaaaaaattcagcttaaaagtgcttttctctttataactttttccctggcccacccagataaaattgtttcctcatgtttttgcacagcatgttacactccattcggttttagcactgcattgcattactgtcattttatctctgccttgctactagataaaagaagtggaagagttgtgtaagggcagccttgagtctggcaggatgacaaagtaaagtgttttgggtcctcagtttcctcatttctaaagtcagggatttgtattcgatggtctctaaagccccttttagccctgctattttgaattactattattattatacgagggaagaaagaggatataaatgactaaggtcactctacctttatgcaaaaataaaatttggaatatgttttggaagtagaaaagagaaggaaattttagagtcagaagaaaataataatagttttttcaaaatgacatagcagaagacatacatattaatgtggcttaggaggaaaataaaggaacaaaagtcttttctgctttcattcataagtacattggcagtacttactgccagaaatcaagaaatttttcctctgaatgaaagattatcctgctgaaaagagtacagaattctttaagaaacagtgaatagaatggtagtaaccagaggcagggaagggtgttgtggagggagaggatgaagaggggctggttaatgagtgaaaaaacacaggtaaatagaagaaataagatctagtgtttgatagcacaatagggcaactgtagttaacagtaatttactgtatatttttaaatagctacaaaagaagatttggaatgtttccaacacaaatgataaatgtttgagatcatggatatctcaattacccaaatttgatcattacacattgtatgcttgtatcaaaatatcacacgtacctcataaatatgtacaactattatgtatccataaaaattaaaaataaattttaaaaagaaacacctaaagaataatctggctgtttctttggtagagaaataggaagaagagaagcagagggaaggttggatgaactggtgcacaaatgcttatgctctcagattacattccattcatatacatcaaccaaaacattaaataataacaaactaaatgcagaagcagagataagaattcatctcgttctgttaatccagacattaaagagatttgcaaaaatgcaaaacagtgccatgctcactaagttttgttttgttttgggaagtatacagttgaaattctttatctacaggtttccatctatggattcaaccaaccgcagatcaaaaatatttgaaaaaaaaattttaaagaatagggtataacacttatttacatagcatttacattatagtaggtataatatgtaattagagatttatgtataacctgtgcacattctcctattacacgtaatctagaggttatgtgtaatactttttggaaatgtttaataaaagcacaatctagaggttacgtgtaataggaaaatgccctgccattttaaataagggactttgaacatcagcattatcaaggtgtcttggaaccaattttctgcagatacagagaaactactgtagttatttttcctaaaaattgttatttatgatatatagtagatttattatttttgaataaattaatacattttagatttttctcagtctttctaatatgatatcatatctaatatcagtagatatggtccaacgatcgaaagttctttggggtcttcaataatttgtttgattgtaaaggagttccgcaaaaagtttgagacctgctgtggtagggtcatttagagaggaattgaagttttggttcctagcatttttgttactgttccttccctatcaagcaactaaaagagctttcatttcttagtcatcactttgtcatcttactctccctgcttcctctttcttatttctttcaataaatgtccctgaaggattgggtagtatttcatagttcagttatttgggaaggatactattcatataaactaattgtgcaatatgccttttctgttcctttaataatgttggtaaatgaaacctttgccagatgccagcttttccttcactggattgtgatttttttgacagctataattatgcatcaagtcatccccagtagggggtccctcatttccttgctgacatgtcctcattactacaggcagtattgaagcaggactaaagatggaggcattctttatgataggtctgatgaatatgttcttgtttcagaagagtatttagaagggctgctttttgtaatgtcagagtattaaaaattttttttgatgtttgtcatctgtgacctctctgctaataactcttaagagctctgaccgcatagcattttgtagttttctaaattttgatccatatgtaggattatttacaagttctagtcttgtcactacaaaagttcctttgtattattataatattatatcgtaagttccagaacttacatagtttttttttttttttttttcatttctcttgcttacatgaactctatgtcgtggcattcagatcagtcacacatagacaactctctgaagtatatattaagtggcagaaacactcccagcttctcaaggacagtgattttagttttcaggagcctatcatggctctacgcacagtcattttggagatcctgatggaaaaggaaatggacaactcacaaagagaatgtattaaggacattctcaccaaacaccttgtagaactctctatactggccagaactttcaagaacactcaggtaaatacaatttaaaactatgtcatcttacctcttgactttccttttattatttaaaaaacagaaagcctgagggaaaaagaaatgtcattaagagatagagatctctattaatatatagtaaaaataattgtttaagagttcccattttggaattagatctgacttttaagccttgggcaagggtacttaatcttttctcaacctcaatttcctggttataaaatgagaagatacgtaacttactatattgataacaattcagtgattttatatactgtgtgtatgtacacacagatacacatacatacatatagagagagacagacagacagacagataggcagacgtggggtggggagatgtcatgcagacagagaggtccttaagatagtccctgacaagtagttaagtcctcaatgaatggtagttgctgctttcattattattattattcatggtagtagtatcagtagtaaaagtatttattcccatatgtcattttcatttcagctccctgaaagggcaatatttcaaattaaacagtacaattcagttagctgtggagtctctgagtggcagctggaagaagcacaagtattctgggcaaaaaaggagcagagtcttgccctgagtattctcaagcaaatgatcaagaagttggatgccagctgtgcagcggtttgttttttttattggctggattagtgttttactgttatttaaaaaaacacaaatgtactttaaaatatttttaataacaattttattagagccttgaaattagtaatttattaacaagatattgtaaaactagtcttgaaaattaatttgtaaatgaagtttagaaactttttcctatatatcacaattctatcagtccatcatgtggtcgattcatttaatatatcccagtattaagcctttaacttcctatagaattcaagaaaggtatgtgggaaatgaatgaaatagctactctaaatttgaaatgacaagtgaaaaaagggaagaggaaatgaatgagagaactaaattagaaaataaaagcaagttgggacaattaggttgtcaatccaaatgctttgaaaatatcacatctaatattttatctaacattacctgttggtttttgcaaacttatgttgctacttcagctgtaaacccagcatacacactggataaagtagaggcattggtgtccccaaggtttgtctacagtggtgtcccacagacatgtacctgcttagtgaatatcagctcactgtgctttattatttatttatttatttattttttgagacggagtcttgctctgtcacccaggctggagtgcagtggtacgacatcggctcaccgcaacctccacctccctggttcaagcaattcccctgcctcagcctcccttgtagctgggattacaggcacatgccaccatgcccagctaatttttttgtatttttagtagagatggggtttcaccatgttggcaagactggtctcgaactcctgagctcaggcaatctacccgccttgtcctctgaaagtgctgggattacaggcgtgagccaccacgcccggcctttactgtactttttgatgttgggcactcattgtatagcatcttctgttattagagaaatcattataccaaagcactgagtgccaatatgatatgtgtaaatattgcttaatagtattggccctgaagtatgtgctgtctggagttacccaacttccttgtacctcagttttctaatctgcaaattggggtaataatagtacttatttaataggattcttgtgagaattaaatgagttaatatatataaagcctttacaaagtgtctgacatatataagtactcaataaatgtgacttgctccaataatggcaataataataataaacagaggatgatcatttcctacatgggattattaaaatagttgtatggcaaaagcagatgaggaaaaactttttttttcccacccaccaaggaaaaacatttttaacctgcttttttccccgtacatgaagggcagttgggtacagtcatggtaatgcattatattttaagattttgcctttcttatacagaacaatcccagcctaaaacttacatacacagaatgtctgagggtttgtggcaactggttagcagaaacgtgcttagaaaatcctgcggtcatcatgcagacctatctagaaaaggtaagatttttggagcaacccttaagatagttacttagcatgaatatgcttcatcttttcatcaagatcaatatatttccaaagcaaataaaagtatggttttatttttctatatattattactgttgtagctctgtatagtctctagggtggagtgaaacattgttacaaaacaaagcagccaattttgaaagtaagcccaagtatagtatctcttcttcctccttcctacctccactaccagctaccctttcagcaggttgcttctgatcatttcttcatttatgcatctacaaaaataactgattaagaataggcaagtcagcccttgctcttcattagcccagccacccacaagtaaaggcttcaatatactagcccctttgactttcctgtttctccctcttattcctttagattcactaattttggaaatagttacctcactaaataagtgtaacatgaaacacatgatgcgattgtctttcttttcttttcttttctttgagatgaagtctctctctgtcgcccaagctggagtgcagtggcgcaatctcggctcactgcaacctctgcctcctgggttcaagcgattctcctgcctcagcttcccaagtagctgggactacaggagtgtgccaccacacccggctaatattttttatttttagtagagacggtttcgccacattggccagtctggtctcgaactcctgacctcaagtgatccacctgcctcggcctcccaaagtgctggcattacaggcttgagccaccacacccagcctgattgtctttaaattttataaagttctctgtttttgcagagttctttacaagtattagctgtctgggttatttctacactgtcaaagttgttttgaaaagtcaagaaaataccatagttcagggctgtccaatcttttggcttccctgggccacattgcaagaagaattgccttgggccacacataaaatatactaacattaatgatagctaatgagcttaaaaaaaatcacaaaagaaatctcataatgttttaagaaaatgtacgaatttgtgttgggccacattcaaagccgtcctgggccacatgcggcccatgggccgtgggttggacaagtttgcaatagttcatataatttagctagcttttatatgtatataagttaaattttagtgtattaccttaatttgagtgattctttagatgtatttagtatttgtaaatataatttaaattggttgtgttttcttgaaggcagtagaagttgctggaaattatgatggagaaagtagtgatgagctaagaaatggaaaaatgaaggcatttctctcattagcccggttttcagatactcaataccaaagaattgaaaactacatgaaatcatcggaatttgaaaacaagcaagctctcctgaaaagagccaaagaggaagtaggtctccttagggaacataaaattcagacaaacaggtaactaggtttctacaagtgacaattttatgttcaccagttaactgagtgagtgtttttgcatagaaagagtgacttggtctttttatctgatatagttttgagctctaaaggtcggcttaactatatatagattatcttggtcttttgggttcttttcggtttttgttttttgtttttttttttgagacaaggtctcactctgtcacccaggctggagtacagtggcgtgatcactgtactccagctcactgcaacctcgacctcctggactcaattgattctccccctgagcccccgaaatagctggggctacaggtgcacgccatacctggctaatttttgtattttttgtagagatggggttttgccatgttgcccaggttggtctcaaactcatgggctcaaacgatctgcccaccttggccgcccaaagtgctgggattacaggtgtgaggcactgtgccctgtctgtcttggtcctactgtagttaatcacaaattagtatgtaagatattgacgtgttcttttgtgaataattcatgctctgcttctaagttcattgtggagaatatagatattagctttctgttttgcttttttggtttgtttgttggtatcatagtggaaaaggagatagatattgaaattaattacaaaagttacctattttgatgtaattaaatccctttatttaagcctgtcttgaatctgtatattttagtgtaagcagaggtgtaagttagctaaatagcttggggagagtcccctttgtcctttgatgcttaggaaggtgtgtgaattgcacagttaagacaaaagtaagtttattccctttataatccttagaagtttgcttttttccctgggataaaaacccaacttttttcattaaatgttgtatatcatgtgtgattttgtagttctgttaaagttcatggcttttgtgttttaccttaattattctatgcaagatacacagtaaaggttcagcgagagctggagttggatgaattagccctgcgtgcactgaaagaggatcgtaaacgcttcttatgtaaagcagttgaaaattatatcaactgcttattaagtggagaagaacatgatatgtgggtattccgactttgttccctctggcttgaaaattctggagtttctgaagtcaatggcatgatgaaggcaagtgttactcagcccaatattctaccctgtgcttgaaaaacttagacataagccccttgatgtcaggaatcgtgtatacctctttgtattcctagcacttggtccagtgctctacacataagtagcattttgtagttttctaaactttgatccatatttaggattatttacaagttctagtcttgtttctacaaaagttcctttgtattatataagctgacaagctgtaaatgatgcaagtttgtgtggaggtgatagaatttagcttggtcctatgtctttgcagttaccataggagagggtctagaatggggcattagattggaggatttagaaagcagttaaagatgatgtgatcacaggtgggttttccccctgctgcagaaatatgggatttttacaataaattacttttgtaagtagagaaaatatatttttcagaaaatgtcaagacagcagtattgtataagtttttctttgaaaaccttagattatagtgatgacacctaatattaaatttaagttgacaagctatatattgttagtcaatttgaaggttagagataaaatgtttctcctgcaggaaaataataagactcataatagatacagtcaatctctgctgtagtatacactaaatattacttttggcctatggggaaaagcaattacttcattttattgtacactgacttctcaggaatcaagatcacagtcacactcagatcacatttgtcttccttagattttttggaatataaacagtaccaagtattctagttctgaatccagtttaatttaggaccaaatattttgatttaccaatgcattaatctagagtacccattagaaagaccttcagataagaaaagaaatgaaggaaaacaatatagttagtgaagttttgttaaccacttgtgctaatagaggagcactgtcttaaaataacttacttgcttagatgtgagaatatttgaaataccttgtttcttaattttgtgtcttttttttaatggtagagagacggaatgaagattccaacatataaatttttgcctcttatgtaccaattggctgctagaatggggaccaagatgatgggaggcctaggatttcatgaagtcctcaataatgtaagtaaacctgaaaatcaaaccacaataattatttttattctattattactatatattatataaagtatatataccattccctctaagaaatggaaatacaaaattttgtattttttgtcttctcacatcacataagttactcattttctctctctaattcctcataggcctctgcctttttctcacacatgcaggcatacacgctctacccactgcagtatctagacagtaatacacattttaatgttaagcaaaatgaaaaatatggattatatttttttgtttatttgcataaatctaatagttcttttcttacagctaatctctagaatttcaatggatcacccccatcacactttgtttattatactggccttagcaaatgcaaacagagatgaatttctgactaaaccagaggtagccagaagaagcagaataactaaaaatgtgcctaaacaaagctctcagcttgatgaggtatttggattaaacatacgtaccttttagaagtgtgatattcagtctttcctagaatatttctttttaaaatcttgtgttattaagatgccatctaaaatcggttcaaggctggcacggtggctcacgcctgtaatcccagcactttgggaggctgaggcgggtggattacttgaggtcagaagttcgagaccatcctggctgaccgacacagcaaaaccctgtctctactaaaaatgcaaaaaacagctgggcatggtggtgggcacctgtagtcccagctactcgggaggctgaggcaggagaatcacttgaactcgggaggcggaggttgcagtgagccaaggttgcgccattgcactccagcctgggcaacaagagcgaaactctgtctcaaattaattaattaattaattaattaaaattggttcaaaattccttaatatttgtcaaagcataggagataccagtagtagtttacttttttcctcaaagcagttggcaaagtgaaacaatagattttgaaaggcacctaagtcattgacgagagtatgtatctttgatgtatttcatttatgactgttttgtttgtatctgaggaattataatcattccattgtctagatttgtgcataaattctgtttttctctttgtttttctaactctgagaagtttaaatgttgggtagttccttatgtaatgttttttgttttttattaataggatcgaacagaggctgcaaatagaataatatgtactatcagaagtaggagacctcagatggtcagaagtgttgaggcactttgtgatgcttatattatattagcaaacttagatgccactcagtggaagactcagagaagtatgttttttttaaagaagaaacgttactttcttgctgtgttactctctgtagagatatattagttatagagcctaataagtaaatctgcttaaaatcacaaacgtaatccaaaagcttaatttatatctgatggcttcagcattccctggttactttttcacttaatatctcttaatagaactggtaataggtgactacactaaattaattatttgatttcttctgataatcttctggcatacatacttattacagagaattgcataatagaggcaagtctattaaaataattgaataactgaacatttctagcctcaaaagtttttttaaacgatgtggttactaaaactgccctgggacttaaaaacaaaaaaaggctttaccatttcttccataggtgctaaaatgccattatttaattattattcttgctgtgtcagttcaaataattacaagctgctatataatctttggttttgtgactagtctctaagtatgcttctaagtatctccccatactttaataattgtatttttttctattcagaatcatatcttcaagtttaaattcttattacttgaaaacgaatgggacttcacatattgtttctctaagcaaacaaaaagtattgacatgtcttttagttgcatttaatggtaatgtgacaggagtatgttatctatgtactatgcaaactattacgtaattattttaagatgtttagtctggttcctcaggtggaatctggtctagttacccttgtcaggtaacctgcaaatttacttgaagctacattaaccactgttgagctttgactctgagctgcatagtggccaaagcccagagtcttcatttctcaatcagagcctgaaccacagattagcaacaagttggggccagtggtatctgctgactattcctgcttgaccttcaatgctgttcctcagtttgtcactaaaatctcttcatttttaaatacagaaggcataaatattccagcagaccagccaattactaaacttaagaatttagaagatgttgttgtccctactatggaaattaaggtaatttgcaattaactcttgattttttttaaactaaattttttttattagattgaaccatttgaaatagtatttttatgtaggtcaaaattggttaaatattggcaaatttcatatgtttcaacctataatttctcagtattatatttcctttgcccaagccctaaaatactcaaaagcttctcctgctttcttttccattgccttctgttctacacctcccatctttcttatgaaggtctatagactgttactttcattggccagaaggagagtttccgtgtgcttatgccaagattaatttttgacttggcaaggaaggttccaattgtcatatattgtttttaaaaattctatgtgcagtaaaatgtattggctgtgatatatcacagtattaagtaatatagtatgtattattataatattaagctgacttcatatgcatgatacacttagctctgttctaatattcttttattgcaagaaataatggaagtaatttcatgtgggcagggatatatgtaataagggttataagtttagaaaatgatcatcttaaatacattgtctttcttttcattttgcagtttagtgcttagtatctagttacttgatttgaaatgtagctgtatcatgtggattaactgctgtttttctagctatatcagctaggtgatttcgctgaatgtttccttaaaatgccagatttagcagttataacccagaaaactccttctactgttttccaaaatttactttatgttttcgtgaggagttatttctcagatgactttacatatattagtgaatctttgatgaaacagtagttaaagttacgagcgtgagccaccacacccggcctaaagttgtagttcttaaccactatcacatcgtcatttgtttctctgtttaatattaaaattgccatttataatgtatttttctttaagtgcaaatagtgtatctgacctattatcaatcatgtttatacttttattaggtggaccacacaggagaatatggaaatctggtgactatacagtcatttaaagcagaatttcgcttagcaggaggtgtaaatttaccaaaaataatagattgtgtaggttccgatggcaaggagaggagacagcttgttaaggtgagccttcccttctctggcttagcccttagagttttagtgatgaaaatttttagttcatattttctttctgctttatttgggattttgtctttattttgaatacttacaaatgaggaagatttgtagagtagaaatgcattattttctagaaccaggcttttctccattttttttgtgtctctgaaagacaatcattattatatggttgattcaagtaaaagaataccattaacatgtacagacatgtacagtgaggttgcttcttatgaaaaaaaatactttggtgtctgtctcttatttccttgaatagtgcaagttgacgtcctttgcatcagtataccgggtctcgtactgtgccaagtgctatttaatgtaccaaaaagggagagcattcttcccttaccatttgctgacgagctctttgggtcctactggggagtggtggaaagacacagtgctgttttactcaggtgtttgcagtatgccttcctaggggggacttccagttaatctaattacagaagtagcgaggggaaactttctaaatcagtgtaaatgttgtagcttattctaaatgaaagaatggcagtaggtatttaattatttgggagactgtcaagaggtgcacagatgctcagattggtttgagtgccctttgctattctcagatgactctgtgtttttataataaaataaactgtacttgtttattcatgcttaattattctgaagggccgtgatgacctgagacaagatgctgtcatgcaacaggtcttccagatgtgtaatacattactgcagagaaacacggaaactaggaagaggaaattaactatctgtacttataaggtaactatttgtacttctgttagttcaccaaaaacatataaaagatgccatttggttgggtgaagtggctcatgcccatattcataatgctttgggaggccaaggtgggaggattgcttgaggccaggagttcgagaccagcctcagcaacatagtgagaccccatcttgacaaaaagttaaaaaaaaaaaaaaagccagagatgatggcatgtgcttgtagtcccttagctacatgggaggctgaggtgggaggatcacttgagtccaggagtttgaggctgcagtgagctcaaactctgcagtgagccccagtccagcctgagcaacacagcaagatcccgtttaaaaaagaagaagaagaagaagatgccattatttggaccaggagtctacaaatgttttctgtgaaggaccaaataataaagatttattttctttgtaaaaagtatttattaatgttaattatagttaggtgtttcttatagtcaactgaagtattttttccttttttttctactcaacaatatgtcacagaaatctttctcattttttaacagctgcattgtgtgtatgtatgtagttttttatacaagtccttatcgatgggcatttgtgttgttttcagtcttttgctgctacaaacaacgctgtattgtagtgaataaccttgaacatacaaatttcatacatgcgcaggcaaatttgtagcatggatttccaaaagttggattgctgggttagaggatacatgcatctgtaatctggtacatattgccaaattactctcaatgggagtgtacccacttacatttcctctagctatttgcctgagaagacaatcctcagtcacattctatgagctgatcatctttgactcttatattaattattcatttaaccagtttagaaataacaataaatccttattttgaagggcctattttccataggtttgtcttttgtgatttcattcctgtacctcatttttaaactttctccttctataaatgttgtaacagggactatgggtgacatgtgcttttttatatatttctagttttccactatgaacgtgttttatttttaaaataatggctaaattaaaagccctaaataggggagtgaagaagaataaattagatctaccctccaaaatgctgcttgagttaggctattgtaataaaaagcagaacttggttttgagcttcttaactgctttcagagactaaatataaaacttattggttgggagaggggcatactgttcattaaggaaagcacaattttttccgtagccttcaagtttgtgagaaatttgtgacatggaaccttctgcaataataactaacataatagatgttttccattagcagtttaaaaagctaattaatcctcgatgaatgcaaaaagcaaaagttgctctataaaggctactctgtagagggatttctttgatgtggttaagatcattggtactcaagctttagcagacatcatagtcacttagagagtttgttaaaaacacagatttctgatccccattcttagaatttctaattcagcaagattagggtagaacctgtgaatgtgcgtttctagcaagataccagttatgttgatgctgcactggtccagggacaacactttgagacccaccagtctacttgttctaccatctattgacctgacttcattttagaacaaagttgatgatctattagctatctcctatctgacagataatgtagagattgctaagaagtttttagagactagatattctgtaatgtgaatgaaaggaaattgtttatgctctaaataccaaacttttagatgacaaagataataggtgaagaattgggttacaaaagtatgggctataggagcacctcctgaactctcagaaagtagctaagatttccaagcagatacacaattgaacctccaaagttcattgctgtaaagcacaaaaaagcaaatgcctgacctagaatatcttgaaagcagaaattactgaactttcatctctaccttatgactttttcaacagctagttttcacacaaaactattttaccatataagttattccattaagatttctagccgggcatggtggcccacgcctgtaatcccagtacttcaggaggccgaggtgggcggatcacttgaggccaggagtttgagaccagcctggccaacatggccaaaccccatctctactaaaaatacaaaaaaattagccaggcgtggtggcacatgcctctagtctcagctacttgggaggctgaggtgagagaatcacttaaacccggatggcagaggttgcagttgagccgagatcacaccactgcactccagcctgggtgacagaccgagacttcttctcaaaaaaggaaaaatgtctagaggccagatgcagtggctcatgcctgtaatctcagcactttgagaggccaaggcaggaggatcacttgaggccaggagtttgaaaccaacctgggcaacacagcaagacctcatctctacaaaaaattaaaaatttagccaggcatgatggcatgcacctatagtcccagctactcaagaagctaaagcgtgaggattgcttgaaatcaggagtttggggctgtgcatgagctgtgatcatgccactgcagtccagtctggacaacagagcaagaacttgtcttaaaaaaaaaaaagtggggttggggggtaacccagataattaattatttaatgttatacatctcaatattaaagtaaaacctgtaaacacaacagtttaggtttgactatttcttagaattacgacaataagccagtaatgttattttgagattactccaagaatgtgaaagttgtgtcatcattatgttaaactaagtgttcttgcctttagttaaggttccctagactacagcgaagtagtctacccagtccagtcatctgtagagtcattcccaatcctgagattcaggtcttctgtggtcattgtgtcaacaagagcatacattgactacctggaactagatcttggtatacaaaccttgtgtcattgtgcaacctcaaaaggagagacttgtatattgaggcatgccagatatctcttgtcagagagaatcagatggaaatgaagacagttcttattgtgtatgttgatagctcagacatagcccttaacattaaccagaattagggtggctggccccatttttctccaccaaaactatgcattgttacaaagtatactgaacaagtctaaaatcttaggtgtcagaggatttgttttctaaaaggcaagtctctaataaacaatatttaagtgctgaaaggagctttgcacttaacctgatcatcctgccttgtgccaataaataatttttattccttgtcatgcatatttcagagcatctatctcagtcatggttctggggagagaagccataatatcttaagacattcactgaatataatgaattaacttcatttctgtgtatctaggatgatatcagctgtgtactttcagagaactgagaaaatagtcatcagtccttttttgtggtattcacacaaaatacccagatacccagttgaaatcttccagagagtctttagtaccagagaaaacactgtcatttgctttttgaaattcaaattcagctctttctccaacaaccaacatcacagttgagactctaagctgaggtagaaaaaagccaacccattcctttctgtatcaatctctcaacaaaaaataagggtttgattccccctccccgccccagagctagatattgatagagagtaatcaatgtaaaagagactttagacagagtacactacactgcaagaatgttaatgtgatcaagcatcaggggtcacagctaactcaaagacagcaggggagagggcatgtagaatacttattaggcaggaagggaaatcagaaaggccatgagatcattcatttgtttattcaataaatgtgaatttatatacctacgttgggttagatactctactgagtgctaggtctatagaagtagtaaaacattgccctagtccttaaggtgttcacattctaatagggaaaataaacataataaacataattataatgcaaagtgtattgttagagatggtaccaccttcacttggttgctcagactgaaacctagaggctttattttctttttacttttattattatggaaaatttcaaacatacaaaaggagacaataacatcatgaacccccttgtacttgtcactcagtttcagcagttaccaactcatggacaattttgttccatttctctttccaccaacttccttccaatattattttaaagcaagatgtcatatcatttcatctgtaaacatttcagtgtgtagatctgtaagataatgtctgttttaaaaaaccattctcacaatactgtcatcactcctaaaacaattcacaaaaattcctaaatgtcaccaagtaatgggagtcattttaaactcttgtttctctcttctcaagtcttgtctattccatcagcaagtcctattggtcaacttccaggcaggtcactttaccacccctgctattaccaccctacttctgcagtcacatctctgtagatactagagtttaaaccaacagtttacttctgctcttggttttccaaagctagttttattaataactgttagagtgatccttttaaaattgtctaagacagagtactcttattcggtatctgtgggggattgtttccagagccccctgtggatactaaaatcaagtcccttatatacagtggtgtatgaagcatttgcctataacctatgaacctcctcccatgtactgtaaatcatctctgggttacttaaaataccttatatagtgtaaatgctgtgtaaatagttgtactgtattggtttttaaaatttttattttttattgtattgtttttattgaggtttttttggtgaatatttttgatccacagttggttgaatctgcagctgcagagggccagctgtattccattttcctgttcagaaccccacatgagttcacattatccctgaatgacaattctctaagttaagtgatctgcctctgctgttctccctccagccttatctaccactctcctcacactcctctcactttctgcttgtatagatgagtcatctccacctgacttacctggtcttttgcaattgcttagacacaccaatttgtttctgcctcagggcttttctgcttctgcctgcaatgcttttccctcagatcttcacaccagtcactcccttacttcattcaggcttctgctgcagtgttaccctcagaaaggcctccgaccatgttgccattacccactttctctcttttttaaacttaagttttgttctcttatacttattatctaatattatgaaatgtttattaggatatatgttcctcaccagaatgaaactttatgagggcatagtcttcatctgcctttttcccactctgttctcagtgccctagccctgtgtgtaacatgtaatacgcccccaacaaataaatgttaataaattaatcaaatgcttccttaagacacaaaacagttcaacatatgtgagaaacttaaaatttaaaaatgtatagaactaaagacaccataaggacgagtgaccagctgagaaaacgaatataataatgttaattagaacaaaaaggatcattttaatataaagaacaagggatttatatgaagaatacaatgatattcaacttttctagtaatctggaaaatacaaattaaaaccacagtgaaatactattaccctcagattagcaaaatataaaaagcctgacaatattaagtattgcgaaagttatggaataactctactggtgggtatataaatcggtacagtcactttgaatagttatttggcaatatctggttaaccgaggtgaagatgtatctctggctcagctgttaaattcctgggtatataccctagagcagacttgtccaacccacagcctgcaggccacatgcagcctacaggatggctttgagtgcagcccaacacaaatttgtaaactttcttaacattatgagattttttttgcagtttttttttcttttttagctcatcagcaatcattagtgttagtgtattttatgtgtggcccaaggcaattcttccagtgtggcccagggaatccaaaagattggacacccctgcctagagaaactgaaatatgttcacgagtagtttatttcattgcagcagtatttcatggaaatgtggaaacaatgtaaatgttaatatgcagattggataactgttgtatttatgtagtatatagctgttaaaatgaatgatgtagagttaaatatgctcacatagttaggataaaatagtattgaataaaaaaccaaattacagaaatatacatatagtatcctaatttttttacttaatacttacaactatttgtgtacatatagctttgaaataaaaatataccaaaaaatacaagaacatgataaaccagctaacagtcatcttgatggtgggagggacttagggtcagtgaagcacacaagggggagcttcatctcttccccagcaaatgtgagaaaatcctagatttgataaagctgtttaatggataaaagggtatctgttaatatcattttctatactttatgtatgtttataatataattttaaaaaactttcctagtaaagttgcttattttatatttaggagtacattttctctctgtgaagataataagactaaagcaagagtacatgtaatttcaataatgaagttacactaaaattgagaccacattcatgggtaataatttccaagtgaaactccccaaatttaattgatactaaaattttaaggaaagcagttaattcctctcctaactggacaaactaagtatggattaatgacagatgacggtgagtatagttaacaggagtgacctctcagagaatcgtggggattgagtgatgggcaggctctcaaacatctaggcagcaggctggaaaattatattctttgagcttaagtttatttccgattggtttcctccaaggagctttgtcttctatggacagagaaatattaatacaacttgaaaaaaaatgctttgcactgactctgatagctgaatgatcatcaaatgctctttaatggccttttaaaattaaaaggtatttaatctgtaactccaggtggttcccctctctcagcgaagtggtgttcttgaatggtgcacaggaactgtccccattggtgaatttcttgttaacaatgaagatggtgctcataaaagatacaggccaaatgatttcagtgcctttcagtgccaaaagaaaatgatggtgagtgacacccaaaattaaaggttattgtaagattatttaatggcttattaaagctgacagctgtcagatattatagaatacaaaaaaactttaatttcatcaggtaattgtcaaagatactaagtaaaagaaaaactcatcagaatgaaagtgtgtgagtgaaaaaggaaggattttaaactacataatatgtcaacccttgtcagataagaaatgtaaaggttattcaatgtgtgctgatttgttttcaatttgggataaactaattcttagcaaacaaaacactaaaatgccaggcacgatggcatgcacctgtaatcccagctacttgagaggctgagtctgggggatcccttgaacccaggattttgaggccagcctgggcaacagagcaagaccccatctctaaaaaacaaacacagtaaacaacaacaacaacaagattatgaagtaattttttatgaaactgatatagaaaaccttctgagacatttacaatgtcacattggccatctagtctgatattcattcgctgaatcagcaacatttattgtatgttttctgtctaccaggtactgtgctgacttaagacttcacaaatatcaaatattacgactaatcatcataatccttatcctcattttaaaatgagaagttcagagaacttgcccaaggccagtgagctaataaacagagcaaggatttgagccttgtctaaatccaaaatccatttattgttcattttattgtgctttctgtgacatgttttttaaaatgtgtgataagtgctataggtgttgtgatggaagtctgtacagggcacacagggtacagtgtaggtatggaggaggaagtgcttagttctgcctggggtggggagaatagacagaagtagatccaagaaatgcttcacagaggaaaaggtgtgtgagccgagttttgtaaatgagttgtttttccaggcagaaggagcatataagcaaaggagaggagacatgagcaggaaaagacaacataagcataggcttagtgtttgaggaagaaaagatgagattggagcagtaattgttggtcaaaagatggagtgttgctttatgaaatgcaaaggagtttgcaccttatgctataggcctcataagaccctaaaggatagtaatatcagacttgcattttagaaagaaattccgacggcactgtgggttctatttttgagaatgcaaactggaggcatgagatggtctgaactgagatgaacagcagtaggaagggagaatcgtgggtagagatgagaaatatgaaggaggcagaattcataggatttgattgctgattaaaaataaggttggggggcgggtgtggtagcgcatgcctgtaatcccagcacttaaggataccaaggcaggaggattgcttgagcccaggagtttaagaccagcctgggaaacatagtgagaccacatctctacaaaaaataaaaagtcagccaggtaatggtggcacatgcctgtaatcccagctactcaagaggctgaggtgagaggattgcttgagcccaggggccaaaattgcagtgagctgtgatcacacccctgcactccagtccaggtgacagagaccctgtcaccctgtctccaaaaaaaaaaaatgttggagaaaaggagtagccagtgcctcccagttttctgtttggggcagctgggtagatggtgaagctctttactgcattgaagaatagaagaggtgactaaagtttgccagagatgaagtatttgaatttggaagtgatccaagtgaagatgctgaatgggcagcttgagaagcacattaagctaaagcttaataaagatatctgggccaaacagatttagaaatcatcagcacatagatggaagggagttgaagtcggtaagctttgcttcaggtagtattttatggcaagaagatgttggaggatagagatctgagtcatatcagctgccatctatgagggattcttctgttctttctcttttcctgttttctattgcaacccaatgctgtgatgccacctgaggttatctggaactacttaggcatttctgtgtttatttctgcttaagagtacaggattattcaaattagaatttaatcaaaacaagtaacagtcactgtaggtgtgcttcctcccccaacaattaatatggaaatcctaaagggattatcacttgtaattaattgcttccctgtccagactgttagcttcttgtaggtaatgtatcctgttcatctttattgcccctatatctgtcatatttttatataaaaatgtgtatattagtttaattgaacacaatattgaaaaataattatatatattctctatttaaaggaggtgcaaaaaaagtcttttgaagagaaatatgaagtcttcatggatgtttgccaaaattttcaaccagttttccgttacttctgcatggaaaaattcttggatccagctatttggtttgagaagcgattggcttatacgcgcagtgtagctacttcttctattggtaatcttcttgtacatatagtagattgagcactttgttgtttggcaggttttatttttgtttgattcagcactttttctacattctgagttgcagggggatgatagtgatgatgtggttagtaaccaacccatcttcattattaaatcatatgtttcttgttcatcctgattcttagtgtctacctttttataacttatgcagaagagaattctcctacttcaataaataataaaaagacagggttttcttctttgttttatagtgaatatggcatattttctctcctctcaatatattattttctgagactttctttggaaaataatgaaacctgtgataacttatttcctttaattatttttgttcttttgcatataacctctaaatatcatcacctagtgattaatactttttaatagaattttgttttcagaatagaaaccatgagatatatttaaatattttgtgtacaatatatattttgactttttttccctaagaaattagaataggtagatagtatggttaacaaaatcctagagtatgagaactaatgtaaacattagagatcatctaatctatttgttgttttttttttttttaactaaagacaactccctccatcacttacatactataccccaggaaggcagggcatgtatgttttgaaagagttcccaggtaattgtgaaactctcttctacatagagaatcactaatctgatacaactagtttataaacaagaaagtaggcctagttaatgacagagcaagccagacacccagtcattctgattccctacccagtgtgtttttttgtaatgccatgtgatttctcccattagtgcatgtcatcatctgtcttaaatacagaaatgcagttttttggggggatacacacctggtgaaatgaattaatgattaatttgtgttaaatataattcatcaaggagaagaaagtttcactgaagagtgaagagtttatccatagacttctcattttataagtatgttcaataaaaatttgagtacatataatgcacagctttgacccaggtaaataatgggtctcaactttagccacaataattttttaagtactaatattttaaaatgtgtgcctattagtaaagagaaaatttttttagcaaatcatctaggatttgtaaaatgcaatatgcattaaaatagctggcaagatttgagttaaactcaacatggccggttatgcacatcatttaagtaggctaaaaatcctaaactacttaaagattataccaagtcagtggtcttaattgaaattatggctatatattagaaagagatggaatcagtgatttcagattgtttgtttcttttttctccagttggttacatacttggacttggtgatagacatgtacagaatatcttgataaatgagcagtcagcagaacttgtacatatagatctaggtaagtaataaaatctatgtatctattctttttagtaaatatttggtcatcatggaatgttgtttgcctaccaagatattacaaatataagagacagataaattgaagcagtaaatattgggtttttttgttttcagcataaacagttgtcctagaagaaacagttaactctgcctggggtactgagtgaaacttaatagatgaggtgtcttttgagcctggtcttcaagaaagaaagaaagcataattcagacagaagatagagcagattcaaaagaaggaatcagggctattccaccaaaacaaggagtaattttaagatgtagcatgttgtgggagtggtgagacattaaatgtgtctggagtgaagtaagcctgtagttgagtcgcttgagagagagattggtactagactgtaaaaagccaggctaaggagtttcaacttcattgcattaaactataggaaataaatgaaggacatgataatattttattttcagaaatataatttcaggagcactttggggagtggtattggcagcaggaagaaaaattaagggatattgtaatagtttagatgagaaatgatgaagatttatactaaagttgtagaaaccagaatattggatttgagggacatttttgtagtaaactgtaccagtgatattagatgaggaaatagtgggggagtggggcccccagataactgaagcttctaactaaggaatatatcaagttttgtaaatagtaagaaagtgatgaatttagttttgctcattattttgaagtattaatggaatttctaggtggaatagacagtttaatatataagaaagaaagaatatatagcttctatgtatatatatagacagtttaatataaaagaaagagaatatatatagctaaggaatatatcaagttttgtaaataataagaaagtgatgaatttagttttgctcattattttgaagtattaatgggatttctaggtggaatagacagtttaatatataagaaagaaagaatatgtagcttctatgtatatatatagacagtttaatatataagaaagaaagaatatatatagctaagaaatatatcaagttttgtaaataataagaaagtgatgaatttagttttgctcattattttgaagtattaatgggatttctaggtggaatagacagtttaatatataagaaagaagtgtgaatgtaatgtaaagaagtgtgaatgtaatgacaaacttctattaaacagtattaatcactaggtgataatttttagaggttatatgcaaaagaacaaaaataattaaaggaaataagttatcacaggtttcattattttccaaagaaattctcagaaaataatatattgagaggagagaaaatatgccatattcactataaaacaaagaagaaaaccctgtctttttattatttattgaagtaggagaattctcttctgcataagttataaaaaggtagatgctaagaatcaggatgaatatgaaacatatgatttaataatgaagctggtttggttactaaccacatcatcactattatccccctgcaactcagaatgtagaaaaagaagtgtgaatgtaatgacggagatccagaatcttcagcaaatagatttcagttgaagtcactgggctggaggaggttctgatctcacacatcatccgtgataaagagacctaaagatgaaatcataagggaagtgagccttggaaaggctgagccagaaaaaaactgagaagtactcaaaggaagtcaggatcttggaaggcaagaggggaaaatcttttatgaaagaagtagtgctcaatagtatctgatacagaaaggtcagagaggatgaatgctgaaaatagacctttgaatttaacaagtaatcaatcctagaggccttggaagtcccctttggatagaatggaggaaaccatactgtaaaaaggcaaggactgaatggaagttaaggatgtgtagattaagaatgtggaatctgccaggcgcggtggatcacacctgtaatcccaacactttgggaggccaaggcaggtggatcacgaggtcaggagattgagaccatcctggccaacatggtgaaaccccatctctactaaaatacaaaaaattagccgggcgaggtggtgggcacctgtagtcccagctacttgggaggctgaggcaggagaatcacttgaacccaggaagcagaggttgcagtgagctaagatcatgccactgcacttcagcctgggcggcagagcaagactgtctcaaaaaaaaagaatgtggaatcttcctacaagaagtttagaagggaagggaaggatggcagagaaatttgctgcaggaatgagagacacatttggtccttgcttttttaagataggagaggtttaaacctgttagatattgaagatacaggagaaaaacaaaagataattgaaatagcaagggaaatcataaagtacgtgagtctgatagcattggctttagattggaggcatgttagcttttctgctgagagagaaggaaaagtgatgccaataggaaagtcttaagctggagaggaaggagtatgagggaattatatttgctattgtgtttttgctgagaaatagaaagcatgctcatttgctaagaattggagggatggtaactggccttaaaagaacaaataaaattctaaaatttaccatggaaatgagaccaagacctgactagaaagggataaataaataagacatgccaagcagtttaaggggcactttcaatcctaaatttgtagtggagccaatagggttgttgtatgattttccagcagtcctcaacatccttggagcttaagttgtagtttaaaatgggagatgtggtggagggacaaggggacaaggagatttgaagcactgatgagagtaatcaaacttattgtctctacccctgggctgagttagggaaagaagagggctaataaactagaaatctcagtcaaatttgaagactgtttagtaagaataaggggtagaaggagaagaggttttgattagaatgtacaatttacaatgtctaagaagcagttttagcagactcatttctggagtacaacccatatgagtggttcattaagatagaatgaaattgaattccattagaacagagacagtcacggatattatatggttttccccagaatgaattctagagttgggacagaggggaagattgtgagctaggtccatgccaacattcagcgaatgtgagagaaaaccttacaggtttacagagtaaacgtgaagatggaagggatttgttagagctagaaggtggggatctcaacagaggagccagactttatctgagaatgaaaggagagtggtctggaagatgcaaattagaggtaggagtatgccaacctgagtccattcaggtcgtgctaaaagcatctataaatgagaagggtaaattggtacaacccctttggaatattgtttggcattatccactaaagctgactttatgtatatcctgtgacccatcaattccactccaacacaaatgcatacatatgtataaaaatgtttatagtagcattattcataatagcccctaactggaaacaatccagatatccatcataggtagaatggatgaacaaattgtcgtatatttatattctctttgtatataatgagattgaatgaataataacacacaatatagaagactctcacaaatataatgctaagtgaaagattccaacataaaagagtacacatgtataattccatttacataaaattcaaaagctgataaaattaatgtatagtgttagaaatcaggatagtggtgaccctttgaaagaggtgattagtgactggtaggagggactgaaagggggcctctggaatgctggtagagttctgttaacgtggatttgttcactttgcagaaatcccagtgagtcacacttgggtgatttgtatactattctgtgtatgtctgtttggttacctgttgctgcataacaaaccaccccaaaatttagtagcttaaaatcacaatttatttattattatctctcatagtctgttgactgggctcagctggacagttttcacttaggatctctcatgcagctgcagttagcatctggggctggagttatcttaagactcagctgggccagagttcatgattgcttcttcacttacatgtctgatgcttcagcactcccatgtggcctctctgtccacaatagtgtcctggacctactcagcatcttggggctccaaggggaaggaagtggaagttaagggctaggcctgcaacttgcacagtatcacttccatcacattatgtcatcacatagtcatgtcatagggtccatcctggttcttccctgtttctgggactccagtaaccctatgttaggcctttgcaatgtatcatttatactgttacctgctagtctatattttctaacctttttttccttttttctgactcactccttggtgtcagtggacatatccggggaacctggactttcagccctactcagctatagcaagccctttccctattgagtgtcagtggaggccaattggggaatctagtcttctgcccttacctagcagtaacaaggtggtgactcccaaaggcattaaaggcagaagtttaaggaagatcctgagtctcgtaataactaaaaggtgtaggtgtcaattgaaaatcattaggcatacctggaaccaggaaaatctcaactttaatgaaaaatggccacctgtaggtgccaacactgagatgacaatgatgttggaattatctaagattttaaagcagccatcataaaaacactgaaggaacaattacaaacatgcttgaaacaaattaaaatatagtaagtctcagcacagaaataagtagtctcagtatagaagtagatataaaggagaaccagatggaaattttagaacagaaaaatatagtaaataaaataaaaaatttcaactgcagaatgaggagacagaagaaattatcagtgaatagaagacagagccgtagaaattacccaagctgagcaacagaggaagaaaattaagaggaaaccttcagcatctagggctaaacagagttcctagacttgataccaaaagaacaatctttaagaactctcaaaacttaacaacaaaatctacttataaaatggccatgtactacaaatgtgtatagcagctttattcataatagccaagaaccggaaaaatccagatgttctacagtgggcaaatgcttaaacaaactgtgttacatccatgccctgaaatactactcagcaatgaaaagaaacagaactattgatatacataacaatttggatgaatctccagagaattaggctgagtgtaaaaagctattcccaaaaggttacatactgtatgattattccacttccatttatataacatacttgaaatgacaaaattataaaaatggagaacagattagtggctgctagaaaaatagggggtcagagggctgggtgataggctatgggagggaaataggtgcagccgtaaagggcagtatgaaggatccttatgataggaatattatatatcttgactgcatcgatgtcagtagtagtatagttttgcaggacattacagttggggtgaaatggggaaaaggcataagggatgatcttttctgtatgatttcttacaactcgaagtgaacatataattatctcataaaatgtcattaattttttttttttgatggagtttcactcttgtcgcccaggctggagtgcaatggcacgatctcagctccatgtatccttcacctcccaggttcaagtgattctcctgtctcagcctcccgagtaactgggattataggcacctgctaccacacccagctaatttttgtatttttagtggagacaaggtttcaccatgttggccaggctggtctcttaactcctgacctcaggtgtcaggcctcctcagcctcaaggtgctgggattacaggcgggagccaccacacccagcctaaaaattttttaaatataaatatatcatctccattttaaattataccagtagttacttcatttttaaaaatcaccctttaacctagatttctctagttgggttaagaagtagttaggttatttggatttgaggtggatctcacagacagtgacaaagatgaggaaggcagccagagcagaagtaaactactgtacatactagtgttcatagaacgtaggtaacatgtggtttcttgcctttgtaaagttcacattctaactggaaagaaagtaaattagctgtcaaacctcctaacttcactgtattctttactttaggtgttgcttttgaacagggcaaaatccttcctactcctgagacagttccttttagactcaccagagatattgtggatggcatgggcattacgggtgttgaaggtgtcttcagaaggtaagtgatatgaagtaaaggagggaaataatttttgatgtcaaaattacatgggctgggcatggttctttgcacctgtaatcccagctgctcaagaggctgaagtgggaggattgtttgagcccaggagtttgagtccagcctaggcaatacagcaagaccctgtatctaaaaaaatacacacacacaaacacacacacacacacacacacacacacacacacacgggttagagatttgtatagattatagaatttagtgctagaatcgtattccagtgccttatcaatactaaggaaaagaccctgggtaaaagcaataatagttcctcttccttccacccacctgggacctaagcccatgtaacatacatactgttattccaaacctcctctggaagcatcccacctttacttttaacacctctatcctggctgactccttcttaatgatccaaactactattgggtgctcatcactgtgcatatagaagagactacatttttatttataggagcttgtgttctagtataacattgtgctactaaaaaagctttgcagttccttgtagttttcccagcataggtctgtgtactcaacttggattggggcagattgcagtcagtgtaaactaataattgccacaataatcaaagactgagagctgagcccagtggtgcatgcctgtaatcaatagtgttgtgttattcttgtaaatgccaagcttgtgaaatagtcaaatacatatttgtattcatttcaaacgtctaatgaaagcccactctgccaagtattatgctattttgagatacagatatgtagattattaagcataggctcagcatactacacatgagagtatacagataaagatacgttgacaacattggtgtgtaacaaaatccgtatttataatgtgtttgactctagatgctgtgagaaaaccatggaagtgatgagaaactctcaggaaactctgttaaccattgtagaggtaaagtattttataaggaagactttattttttttcttaccaggtagactgtgtatctcatcaggaagtcactgatgtgaagagcactgcttcattttaacatagggggatgtggctgggcagcagaaaggaggagattgtgcacttagccttttcacacatccaaaaatactggtttagaaatgccttcagcccccttgagtttcttggaatgttagagcattgtaagtagtctctagttttcaattcataaatcaattctttgacatttagatattccatatggtattattattttcagaatggtttccattagggtttaagaaaaatcagaaatttatatctcctttttccctgctcaggttcagaactaattagtcagacaaatggagatcaaattgtcagcatcattactagaggaacatggcttaggaatgagggccagactagtttactgctggtgctacctcagtacctctctgctgtcttaactttgggacagctcacctgaatagggtttgggcctgcagagcaaacacatgtaatcaggatcactgccttgtcttgatccagggcagaaaaaaggaagtcaaacaaatttcagtgtctgtgctgttagtacctatgccagtcattcaccaatctggtaagggtatgtgagacaagaaatcaggagtgtggcctccccagggaagcatggcaggtagagtgcagtatgggcttgccacttttccactactcagcttttcttcctttaacctgatttatgttggactggctgcatgttagtattacttttactgcatttaaaaaacattgatgctgatcaaattcaaaccaggtttctagagatggggcaggaatatgtgcatttttaaaaatctctcctactgttcaactaggatatgagaactgtcttaattcattggcattaaccattaagcctgtggtcaataagggtggggctttatcccttggaagatgagtaacagtccatcagggtggtcctgtgtgcacctttatgaaccgaggcatctttatagatctcctttggactgcagatggtaatacagattttgctacaaggagtttgctgaaataggtcccaataatacgttggtaaaattaaatccaaggctgtgctattcccaaggttaaaaatacattcttttttcttttaccgatttcaaattctgttcatacatgttgtcatttgttacagtttgccattggttctgcagtaagaataaatgataagaaaataagcatgatgtgtaacattttaaaaaaataatacatggtaacatggatgcctcaataatgtcgaaattaaactctaaagttatattatcttgcactttttcatgtaagaaaaagagggctgggcgcggtggctcatgcctgtaatcccagcactttgagaggccgagacaggtggatcacctgaggtcaggagttcaagaccagtttggccaacatggtgaaaccccgtctctaataaaaatgcaaaaattagctgggcgtgatggcgggcacctgtaatcccagctactcaggaggctgaggcaggagaatcgcttgaacccaggaggtggaggttgtagtgagctgaaattgcaccattgccctccagcctgggcgacaagagcaagactctgtctgtcttaaaaaaaaaaaaaaaaaaaagcccaaacttttcaaattaaagagtcaaagcagcttaacatattctttagtattttactctacctagtttcagtcagaagggatttttatgctaaggtggatttgggagtttcttccagtacttgtatcctacctaacactcaccagaagaaggtagttcttttagggcctcagaaatcttactagtttaatgccaaactgcttatggacttcactttttagagtagtaggagatcaaatgagagaagtgacagtggccagatcctttgccattgtaaggactttggatttcctttgagtgagggttttgagtctgaaaagtgatttgcatctccacctacaataactgtcacctttaaacacaccctccgggaggaggagccaagatggccgaataggaacagctccggtatacagctcccagcgtgagcgatgcagaagacaggtgatttctgcatttccatctgaggtaccaggttcatctcactagggagcgccagacagtgggcgcaggtcagtgggtgcacgcactgtgcgcgaactgaagcagggcaaggcattgcctcacttgggaagcgcaagggtcagggagttccctttcctagtcaaagaaaggggtgacagacggcacctggaaaatcgggtcactcccacccgaatattgcgctttttggaccggcttaaaaaacggcgcaccacgagattatatcccgcagctggcttggagggtcctacgcccacggagtctcgctgattgctagcacagcagtctgagatcaaactgcaaggtggcagcgaggctgggggaggggcgcccgccattgcccaggcttgattaggtaaacaaagcagccgggaagctcgaactgggtggaacccaccacagctcaaggagacctgcctgcctctgtaggctccacctctgggggcagggcacagacaaacaaaaagacagcagtaacctctgcagacttaaatgtccctgtctgacagctttgaagagagtagtggttctcccagcacgcagctggagatcggacaacaggcagactgcctcctcaagtgggttcctgacccctgacccccgagcagcctaactgggaggcaccccccagcaggggcacactgacacctcacacggcagggtactccaacagacctgcagctgagggtcttgtctgttagaaggaaaactaacaaacagaaaggatatccacaccaaaaacccatctgtacatcaccatcatcaaagaccaaaagtagataaaaccacaaagatggggaaaaaacagaacagaaaaactggaaactctaaaacgcagagcacctctcctcctccaaaggaacgcagttcctcaccagcaacggaacaaagctggatggagaatgactttgacgagctgagagaagaaggcttcagacgatcaaattactctgagctacgggaggacattcaaaccaaaggcaaataagttgacaactttgaaaaaaatttagaagaatgtataactagaataaccaatacagagaagtgcttaaaggagctgatggagctgaaaatcaaggctcgagaactatgtgaagaatgcagaagcctcaggagccgatgcgatcaactggaagaaagggtatcagcgatggaagatgaaatgaatgaaatgaagcgagaagggaagttcagagaaaaaagaataaaaagaaatgagcaaagcctccaagaaatatgggactatgtgaaaagaccaaatctacgtctgattggtgtacctgaaagtgatggggagaatggaaccaagttggaaaacactctgcaggatattatccaggagaacttccccaatctagcaaggcaggccaacgttcagattcaggaaatacagagaatgccacaaagatactctttgagaagagcaactccaagacacataattgtcagattcaccaaagttgaaatgaaggaaaaaatgttaagggcagccagagagaaaggtcgggttaccctcaaagggaagcccatcagactaacagcagatctctcggcagaaaccctacaagccagaagagagtgggggccaatattcaacattcttaaagaaaagaattttcaacccagaatttcatatccagccaaactaagcttcatcagtgaagtagaaataaaatactttacagacaagcaaatgctgagagattttgtcaccaccaggcctaccctaaaagagctcctgaaggaagcactaaacatggaaaggaacaaccggtaccagccactgcaaaatcatgccaaaatgtaaagaccatcgagactaggaagaaactgcatcaactaacgaacaaaatcaccagctaacatcataatgacaggatcaaactcccacataacaaaattaactttaaatgtatatggactaaatgctccaattaaaagacacagactggcaaattggataaagagtcaagacccatcagtgtgctgtattcaggaaacccatctcacgtgcagagacacacataggctcaaaataaaaggatggaggaagatctaccaagcaaatggaaaacaaaaaaaggcaggggttgcaatcctagtctctgataaaacagactttaaaccaacaaagatcaaaagaaacaaagaaggccattacataatggtaaagggatcaattcaacaagaagagctaactatcctaaatatatatgcacccaatacaggagcacccagattcataaagcaagtcctgagtgacctacaaagagacttagaatcccacacattaataatgggagactttaacaccccactgtcaacattagacagatcaacgagataaaaagtcaacaaggatacccaggaattgaactcagctctgcaccaagcggacctaatagacatctacagaactctccaccccaaatcaacagaatatacatttttttcagcaccacaccacacctattccaaaattgaccccatagttggaagtaaagctctcctcagcaaatgtaaaagaacagagattataacaaactatctctcagaccacagtgacatcaaactagaactcaggattaagaatctcactcaaaaccgctcaactacatggaaaccaaacaacctgctcctgaatgactactggatacataatgaaatgaaggcagaaataaagatgttctttgaaaccaacgagaacaaagacacaacgtaccagaatctctgggacacattcaaagcagtgtgtagagggaaatttatagcactaaatgcccacaagagaaagcaggaaagatccaaaactgacaccctaacatcacaattaaaagagctagaaaaggaagagcaaacacattcaaaagttagcagaaggcaagaaataactaaaatcagagcagaactgaaggaaatagagacacaaaaaacccttcaaaaaattaatgaatccaggagctggttttttgaaaggatcaacaaaattgatagaccgctagcaagactaataaagaaaaaagagagaagaatcaaatagacacaataaaaaatgataaaggggatatcaccaccgatcccacagaaatacaaactaccatcagagaatactacaaacacctctacgcaaataaactagaaaatctagaagaaatggataaattcctcgacacatacactctcccaagactaaaccaggaagaagttgaatctctgaatagaccagtaacaggagctgaaattgtggcaataatcaatagtttaccaaacaaaaagagtccaggaccagatggattcacagctgaattctaccagaggtacaaggaggaactggtaccattccttctgaaactattccaatcaatagaaaaagagggaatcctccctaactcattttatgaggccagcatcattctgataccaaagccgggcagagacacaaccaaaaaagagaattttagaccaatatccttgatgaacattgatgcaaaaatcctcaataaaatactggcaaaacgaatccagcagcacatccaaaagcttatccaccatgatccagtgggcttcatccctgggattcaaggctggttcaatatatgcaaatcaataaatgtaatccagcatataaacagaaccaaagacaaaaaccacatgattatctcaatagatgcagaaaaagcctttgacaaaattcaacaacccttcatgctaaaaactctcaataaattaggtattgatgggacgtatttcaaaataataagagctatctatgacaaacccagagccaatatcatactgaatgggcaaaaactggaagcattccctttgaaaactggcacaagacagggatgccctctctcaccactcctattcaacatagtgttggaagttctggccagggcaatcaggcaggagaaggaaataaagggtattcaattaggaaaagaggaagtcaaattgtccctgtttgcagatgacatgattgtatatctagaaaaccccactgtctcagcccaaaatctccttaagctgataagcaacttcagcaaagtctcaggatacaaaatcaatgtacaaaaatcacaagcattcttttacaccaacaacagacaaacagagagccaaatcatgagtgaactcccattcacaattgcttcaaagagaataaaatacctaggaatccaacttacaagggatgtgaaggacctcttcaaggagaactacaaaccactgctcaaggaaataaaagaggatacaaacaaatggaagaacattccatgctcatgggtaggaagaatcaatattgtgaaaatggccatactgcccaaggtaatttacagattcaatggcatccccatcaagctaccaatgactttctttacagaattggaaaaaactactttaaagttcatatggaaccaaaaaagagcccgcatcggcaagtcaatcctaagccaaaagaacaaagctggaggcatcacactacctgacttcaaactatactacaaggctacagtaaccaaaacaacatggtactggtaccaaaacagagatatagatcaatggaacagaacagagcccttagaaataacgccgcatgtctacaactatctgatctttgacaaacctgagaaaaacaagcaatggggaaaggattccctatttaataaatggtgctgggaaaactggctagccatatggagaaagctgaaactggatcccttccttacacctgatacaaaaattaactcaagatggattaaagacttaaacgttagacctaataccataaaaaccctagaagaaaacctaggcattaccattcaggacataggcatgggcaaggacttcatgtccaaaacaccaaaagcaatggcaacaaaagccaaaattgacaaatgggatctaattaaactaaagagcttctgcacagcaaaagaaactaccatcagagtgaacaggcaacctacaaaatgggagaaaattttcgcaacctactcatctgacaaagggctaatatccagaatctacaatgaactcaaacaaatttacaagaaaaaaacaaacaaccccatcaaaaagtgggtgaaggacatgaacagacacttctcaaaagaagacatttatgcagccaaaaaacacatgaaaaaatgctcatcatcactggccatcagagaaatgcaaatcaaaaccacaatgagataccatctcacaccagttagaatggcagtcattaaaaagtcaggaaacaacaggtgctggagaggatgtggagaaataggaacccttttacactgttggtgggactgtaaactagttcaaccattgtggaagtcagtgtggcgattcctcagggatctagaattagaaataccatttgacccagccatcccattactgggtatataaccaaaggactataaatcatgctgctataaagacacatgcacacgtatgtttattgcggcattattcacaatagcaaagacttggaaccaacccaaatgtccaacaatgatagactggattaagaaaatgtagcacatatacaccatggaatactatgcagccataaaaaatgatgagttcatgtcctttgtagggacatggatgaaattggaaatcatcattctcagtaaactatcgcaagaacaaaaaaccaaacaccgcatattctcactcataggtgggaattgaacaatgagaacacatggacacaggaaggggaatatcacactctggggactgtggtggggtggggggcggggggagggatagcattgggagatatacctaatgctagatgacgagttagtgggtgcagcgcaccagcatggcatatgtatacatatgtaactaacctgcacaatgtgcacatgtaccctaaaacataaaagtataatttaaaaaaaactaaaaaaacaaacaacaaaacaaacaaacaaaaaaaacacaccctccaatgctttgtgtattttacactcatctacctaatcttccctccgtaaatctgtccgaatttccccaaatcatttggtgtgattgttccaatcttcaagaataattttcccagtgatcttaccacagtaagaccctttctgccttcagctttaggagggtgcttctcaattagcatcctggttcccagtcctctgggacatcatttctttcctctcttggattcatttcttttcttctcttagatttcattgaggcacagtcactatttctgaactgatctccccgcttcctaagcccctccttcagagcactttaacctgggtgtatttcccttttcttttcagtgtatttgtctctcctggccttcaagattttattttcttcctaatggaccattctctcctctaagattttatgtgttatgctaaggaaatatatctctccctctaactcagtgatgcttagccaagagcagttttgtcccctagaggacagttggcaatgtctggaggcatttttattgtcacaattggggatgggagatgaggatagtattggcatctactgggtagaggccagggatgctgctgaacacctcagaatgtacaagttagcccccacagcaaagaaataccccatccaaaatgacaatagtgctgagactgagaaaccctgctctagcttaatcagtctgtattcctttactgtttccaaccacttctgtcttgtcagactgaaacataattttttacttattccagttcctccttaattctaatatttgcaagtatgattcctgacacaagcccttggttttgaagtaatttagatttttcttctacttcaacccaagaaaaccatctagtctgtattagaggccttcattccttttcattagttcattaataaaatatattaatatttcccttttgtgggtgaaactggtttggatctctgaaatctaaagccatgtcagtgcccaacttgaagtcacataggaaaccttgaacttaacggacaagctacatgtaatcaagctcagtttctccacagtatttaatggtcctggaggacactcaaaacagcattaaaaaatagagagattttggttctgctaatctagtacgtgtcctgaaactaaatctgctaaaggcattttatagtcccaacctgcagatttactgagaaactgtatacagatagcagcaaaaaagtgttccaaccttgtaatactggaatgccctgtagaatcattctttatattgtctccacttattactaagatttgtaagcatttgctaaagcctattttttttaaagttctgtgtttataaataccagagcagttagctgttctgaactgccaatatcagaaattcctcatgaactcactttctaaaatttacgacctaaagctacttgctctagccatgtcagttgttttggtatcctaattctacacctaatatatatctcaagattccaaacgcagcaccaaaccttgggttttgaggaggtttcaacaaattatacctttctggatccacccagatttagaactgagagaaaaagagccataggaatagggtggagatcagaatttcagatttgttactgataaaactattggagaagacggcttaggagtgaggtccaaataggcttgctggtgctctccagttcccacatcccaatctataccttgagacagcctgggctgaggaagaattgggccctacaaagcaaatacactaacccagggttaagagtagagagagaaggaaagaaagtgactaaccttttaatagattagtttcatccagtcaggaaacatgggtcaagggatgtcacccctaaccatggaggaagaatgaattcagaatgaaatgagaagcttggagcattatgctaggatagtttcctcaaggaaacatgaagtgtgcatgatgtttgttcccctcccccatcaactaccatgtgactggcttatttgtatgatactggttctactgtttctaagtatgtgattaaaatgtacattgttcttttaatacatatgttctctctgtttaggtccttctatatgatccactctttgactggaccatgaatcctttgaaagctttgtatttacagcagaggccggaagatgaaactgagcttcaccctactctgaatgcagatgaccaagaatgcaaacgaaatctcaggtgagcagtattttaagaaggtcctgttgtcagtttttcagattttcttattcccaaggcctttaaactgttcacctcactgaaacctttgtgtttttgtccttagtgatattgaccagagtttcaacaaagtagctgaacgtgtcttaatgagactacaagagaaactgaaaggagtggaagaaggcactgtgctcagtgttggtggacaagtgaatttgctcatacagcaggccatagaccccaaaaatctcagccgacttttcccaggatggaaagcttgggtgtgatcttcagtatatgaattaccctttcattcagcctttagaaattatattttagcctttatttttaacctgccaacatactttaagtagggattaatatttaagtgaactattgtgggtttttttgaatgttggttttaatacttgatttaatcaccactcaaaaatgttttgatggtcttaaggaacatctctgctttcactctttagaaataatggtcattcgggctgggcgcagcggctcacgcctgtaatcccagcactttgggaggccgaggtgagcggatcacaaggtcaggagttcgagaccagcctggccaagagaccagcctggccagtatggtgaaaccctgtctctactaaaaatacaaaaattagccgagcatggtggcgggcacctgtaatcccagctactcgagaggctgaggcaggagaatctcttgaacctgggaggtgaaggttgctgtgggccaaaatcatgccattgcactccagcctgggtgacaagagcgaaactccatctcaaaaaaaaaaaaaaaaaaacagaaacgtatttggatttttcctagtaagatcactcagtgttactaaataatgaagttgttatggagaacaaatttcaaagacacagttagtgtagttactatttttttaagtgtgtattaaaacttctcattctattctctttatcttttaagcccttctgtactgtccatgtatgttatctttctgtgataacttcatagattgccttctagttcatgaattctcttgtcagatgtatataatctcttttaccctatccattgggcttcttctttcagaaattgtttttcatttctaattatgcatcatttttcagatctctgtttcttgatgtcatttttaatgtttttttaatgttttttatgtcactaattattttaaatgtctgtacttgatagacactgtaatagttctattaaatttagttcctgctgtttatatctgttgatttttgtatttgataggctgttcatccagttttgtctttttgaaaagtgagtttattttcagcaaggctttatctatgggaatcttgagtgtctgtttatgtcatattcccagggctgttgctgcacacaagcccattcttattttaatttcttggctttagggtttccatacctgaagtgtagcataaatactgataggagatttcccaggccaaggcaaacacacttcctcctcatctccttgtgctagtgggcagaatatttgattgatgcctttttcactgagagtataagcttccatgtgtcccacctttatggcaggggtggaaggaggtacatttaattcccactgcctgcctttggcaagccctgggttctttgctccccatatagatgtctaagctaaaagccgtgggttaatgagactggcaaattgttccaggacagctacagcatcagctcacatattcacctctctggtttttcattcccctcatttttttctgagacagagtcttgctctgtcacccaggctggagtgcagtggcatgatctcagctcactgaaacctctgcctcctgggttcaagcaattctcctgcctcagcctcccgagtagctgggactacaggcgtgtgccaacacgcccggctaattttttgtatttttattagagacggagtttcaccgtgttagccaggatggtctcgatcgcttgacctcgtgatccaccctcctcggcctcccaaagtgctgggattacaggtgtgagccaccgcgcccggcctcattcccctcatttttgaccgtaaggatttcccctttcttgtaagttctgctatgtatttaaaagaatgttttctacattttatccagcatttctctgtgttctgttggaagggaagggcttaggtatctagtttgatacataggtagaagtggaacatttctctgtcccccagctgtcatcatataagataaacatcagataaaaagccacctgaaagtaaaactactgactcgtgtattagtgagtataatctcttctccatccttaggaaaatgttcatcccagctgcggagattaacaaatgggtgattgagctttctcctcgtatttggaccttgaaggttatataaatttttttcttatgaagagttggcatttctttttattgccaatggcaggcactcattcatatttgatctcctcaccttcccctcccctaaaaccaatctccagaactttttggactataaatttcttggtttgacttctggagaactgttcagaatattactttgcatttcaaattacaaacttaccttggtgtatctttttcttacaagctgcctaaatgaatatttggtatatattggtagttttattactatagtaaatcaaggaaatgcagtaaacttaaaatgtctttaagaaagccctgaaatcttcatgggtgaaattagaaattatcaactagataatagtatagataaatgaatttgtagctaattcttgctagttgttgcatccagagagctttgaataacatcattaatctactctttagccttgcatggtatgctatgaggctcctgttctgttcaagtattctaatcaatggctttgaaaagtttatcaaatttacatacagatcacaagcctaggagaaataactaattcacagatgacagaattaagattataaaagattttttttttgtaattttagtagagacagggttgccattgtattccagccttggcgacagagcaagactctgcctcaaaaaaaaaaaaaaaaaggttttggcaagctggaactctttctgcaaatgactaagatagaaaactgccaaggacaaatgaggagtagttagattttgaaaatattaatcatagaatagttgttgtatgctaagtcactgacccatattatgtacagcatttctgatctttactttgcaagattagtgatactatcccaatacactgctggagaaatcagaatttggagaaataagttgtccaaggcaagaagatagtaaattataagtacaagtgtaatatggacagtatctaacttgaaaagatttcaggcgaaaagaatctggggtttgccagtcagttgctcaaaaggtcaatgaaaaccaaatagtgaagctatcagagaagctaataaattatagactgcttgaacagttgtgtccagattaagggagataatagctttcccaccctactttgtgcaggtcatacctccccaaagtgtttacctaatcagtaggttcacaaactcttggtcattatagtatatgcctaaaatgtatgcacttaggaatgctaaaaatttaaatatggtctaaagcaaataaaagcaaagaggaaaaactttggacagcgtaaagactagaatagtcttttaaaaagaaagccagtatattggtttgaaatatagagatgtgtcccaatttcaagtattttaattgcaccttaatgaaattatctattttctatagattttagtactattgaatgtattactttactgttacctgaatttattataaagtgtttttgaataaataattctaaaagcata

SEQ ID NO: 5 - DNA, 81070 bp, Homo sapiens
  source 1..81070: mol_type = genomic DNA; note = BRCA1_gene
gctgagacttcctggacgggggacaggctgtggggtttctcagataactgggcccctgcgctcaggaggccttcaccctctgctctgggtaaaggtagtagagtcccgggaaagggacagggggcccaagtgatgctctggggtactggcgtgggagagtggatttccgaagctgacagatgggtattctttgacggggggtaggggcggaacctgagaggcgtaaggcgttgtgaaccctggggaggggggcagtttgtaggtcgcgagggaagcgctgaggatcaggaagggggcactgagtgtccgtgggggaatcctcgtgataggaactggaatatgccttgagggggacactatgtctttaaaaacgtcggctggtcatgaggtcaggagttccagaccagcctgaccaacgtggtgaaactccgtctctactaaaaatacaaaaattagccgggcgtggtgccgctccagctactcaggaggctgaggcaggagaatcgctagaacccgggaggcggaggttgcagtgagccgagatcgcgccattgcactccagcctgggcgacagagcgagactgtctcaaaacaaaacaaaacaaaacaaaacaaaaaacaccggctggtatgtatgagaggatgggaccttgtggaagaagaggtgccaggaatatgtctgggaaggggaggagacaggattttgtgggagggagaacttaagaactggatccatttgcgccattgagaaagcgcaagagggaagtagaggagcgtcagtagtaacagatgctgccggcagggatgtgcttgaggaggatccagagatgagagcaggtcactgggaaaggttaggggcggggaggccttgattggtgttggtttggtcgttgttgattttggttttatgcaagaaaaagaaaacaaccagaaacattggagaaagctaaggctaccaccacctacccggtcagtcactcctctgtagctttctctttcttggagaaaggaaaagacccaaggggttggcagcaatatgtgaaaaaattcagaatttatgttgtctaattacaaaaagcaacttctagaatctttaaaaataaaggacgttgtcattagttctttggtttgtattattctaaaaccttccaaatcttaaatttactttattttaaaatgataaaatgaagttgtcattttataaaccttttaaaaagatatatatatatgtttttctaatgtgttaaagttcattggaacagaaagaaatggatttatctgctcttcgcgttgaagaagtacaaaatgtcattaatgctatgcagaaaatcttagagtgtcccatctggtaagtcagcacaagagtgtattaatttgggattcctatgattatctcctatgcaaatgaacagaattgaccttacatactagggaagaaaagacatgtctagtaagattaggctattgtaattgctgattttcttaactgaagaactttaaaaatatagaaaatgattccttgttctccatccactctgcctctcccactcctctccttttcaacacaaatcctgtggtccgggaaagacagggactctgtcttgattggttctgcactggggcaggaatctagtttagattaactggcattttggcttttcttccagctctaaaacaagctccatcacttgaaatggcaaaataaaatcatggatgaggccgagggcggtggcttatgcctgtaatcccagcactttgggaggccaaggtggtaggatcacgaggtcaggagatcgagaccatcctggccaacatggtgaaaccccctctccactaaaaatacaaaaattagctgggcgtagtggcatgtgcctgtaatcccagctactcaggaggctgaggcaggagaatcacttgaaccaggaggcagatgttgctgtgagccaatatggcaccactgaactccagcgacagagctaaactccatctcaaaaaaaaaaaaaaaaaaaaaaaaacatggatgatcggtgtcgttgagaggataggtatttggaagaacctttgtttgaaactggctctgtacatacaatgaaattacatacttatttacatacaatgaaatgcagaggttttttttttatataggatctctgtcgagaggctggagtgcagtggtgctatcacagctcactgcagcctcaacctcgtcaggctcaagcaatcctcccacctcagcctccagagtagcagggacgataggtgtgcaccaccatgcccagctaatttttgtatttttttttctttttttgagatggagtcttgctctgttgcccaggctggagtgcagtggcgcgatctcagctcactgcaaactctgcctcccgggttcatgccattcttctgcctgagcctcctgaatagctgggactacaagcacccactaccacgcccggctaattttttgtatttttttttcttttttagtagaggcgggatttcaccgtgttagccaggatagtcttgatctcctgaccttgtgatccacccgcctgggcctcccaaagtgctaggattacaggcataagccactgcgtccagccattcttgtatttttctgttgtagagatagggttttgctatgttggccatgctggtctcaaactcctgacctcaagtgatctaccctcccttggcctctcaaggtgctgggattacaggcctgagccattgcacccagccatggtctaaaaatcttgattgaaataccaccttttcatttccagacacccctatttaaaattaccacacccccagcacacactttatcttctattcctgctgcttctccataacactgattactagctgacattctatgtaatgtatccattttttatctctagtcccacagaatgtaaactccaggatgggatttttgttttgtttacatacatctgtatgttcagtagttagaacggtacttgggacctagttgccactcaataaacatttgtcaaataaataataaactaaactaaattagttctttaatttttttaaatatggtgatggttagtagtgagtaacattcaaaaaataagttgaaaagttgtaccattgcctcttacccacaataaaaaagggtaaattcttttctgctttatgaaagttgtttttcatatttgaagtcaagttaatcagattaaggaaaatgtatgttgtgttttcagagcgatacaagatttataaataaccatcctctcccttgcccttcaacattatagctaaacaaaaataagaggaaaacaggattcacaatttatcaatttattgaaaatcagagccagagaagcaggaaatgacattgtaggaaaaaactgcttttgaaaaagcacaaaacttactcatgacaatcagtgatcaggaaaatcctcaatagtgtggcatttggatacatttatgtttcatttccatgggagagagtcataaaaataggatgttctttctcattctggcaaattaaaccatcaattaaaaactcagatacataaaaattaaagatgtaagaatgaaaatgctaaattgttattttcaatcaactattatgttttctagcttttcattgcttttttctgtttcctgttaagattaatttctttttttttttttttttttttttttgagacagactttggctcttgttgcccaggctggagtgcagtggcacaatctcggctcactacaacctccacctcccgggttcaagcaattctgctgcctcagcctccggagtacctgggattgcaggcatgtgccatcacaccagctaattttgtatttttagtagagacagggtttctccatattggtcaggttggtctcgaactcctgacctcaggtgatcctcctgccttggcctccgaaagtgctgggattacaggcgtgagccaccgctcccagactttttgttttgttttgttttgtttttttgagacacggtctcgctctgctgcctaggctggagtgcagtggcacgatcttggctcactgccagctccgcctcccgggttcaggccattctcctgcctcagcctcccgagtagctgggactacaggcgcccaccactatgcccggctaattttttgtatttttagtagagacggggtttcaccatgttagccaagatggtctcgatctcctgaccttgtgatccacccgcctcagccttccaaagtgctgggattacagtcctgagccactgcgcccggcctggacctttttttttcggggtggggggttggagtctggctctgtcgcccaggctggagtgcagtggcgccatcttggctcactgcaacctccgcctgccaggttcaagttcaagcgcttctcctgcctcagcctcctgagtagctgggattataggcgcacgccaccgtggccggctaattttgtatttttagtagagatagggtttcatcacgttggtcaggctggtcttgaagtcctgatctcgtgatccacccgcctcggccttccaaagtgctggcgtgagccactgcgcctggcttaagattaatttttgtttgttttgtttttgagacggagtctcgctctttcacccaggccggagtgcagtggcgccatctcggctcactgcaagctccgcctcccgggttcacgccattctcctgcctcggccccccaagtagctgggactacaggcgtccaccaccacgcccggctaattttttgtatttttagtagagacggggtttcaccgtgttagccaggatggtctccacttcctgacctcgtgatccgcccacctcggcctcccaaagtgctgggattacaggcgtgagccaccgcgcccggccttaagattaatttttatggtgttttacattcatttgtatggaaagttctaggatagggatcatatttcacttccttttaatatagtacagtatagcacaatttgcagttatgtcttaatatgtgatcaggaatgatcatgactggaaacagtgttatttgtggtagctatagggtaggtaaggttttcagcctgttttaggtttcttgaactaaaattccttctgctgtcttctaagtcaatattggcagctatttctgacaattggtagttctttgtaactttttacctatgactataacatttttgactttcagaagaatttgctaaaatgtgttccccggtgggttgttgtttttcaacctaaacctagctgctttttccagtcacttatccgtattggaagctcaaaatgcaaatatacagtaggcctaaaatattgcctggtttgaaaagtgtttaaaatatttgaatcatttttatagtaaacatttactctcatcaggacctagaaggggaacattttaattttttttcttttcccttttcacagtcttccttcaacattcattacctttttacatatcggagttttcatctgttcaaagtttgtgtttacagtgtgtttatatagtttagattataattaccatactgaaatataattgtttcagaattgagtcagtggtgagaatgaaagccatctggtatgataactgaatccaatttttcttttacggagaatttctttgaaatgtagcttatctcagaaatagggatttagtaaccaatcagagttttctttgtcaaggttgtttttctttttaaagtcacatttggtcccagtaataataccaatgttggtacaagttatctcaggttgtgaagcatttttcccaagtcatctcaggttgtgaagcattttcccaagtagcatttaattttattcttgcaatagcccaaggagtctggcagggtgaatggcaagagaaggaaacaggttcaggtagagtggttagcccaaggtggctctgcttatatacacaactggtagtagaaacccagcctcctgacttagttcattgtttttcttttcactgccctgtgctatgtcaaaaaccccatgattacaagagttgtattacaacccttcacaataaggttactgtccacaagcttttcttgtgatccttttcttttttttttttctttttttgagatggattctctgtcacccaggctggcccgccttggcctcccaaaatgctgggattacagcgtgagccaccgcacctggcccttgtgatccttttctaaaaagttaaatatttaaggaaaaaaccacattcttgtcacactgccaggttagtcgttctttgatatcttgcctggactttatccaaaaaatccgtttcaaaaattcacatttagagctaagtgtagtggctcacgcctgtaatcccggtcgaggcagatggatcacttgaggtcaggacttcaagaccagcctgggcaatatggtgaaaccccttccctaccaaaaatacaaaaaaattagccgggtgtggcagcacgcgcctgtagtcccagctacttggaatgctgaggcacaagaatcacttcaatccgagaggcagaggttgcagtgagccaagaccacaccactgcactccagcctgagcagcagagtgagtgagactccatctccaaaaaaaaaaaaaaaggttcacattcagaagaaagctaaaggccgggtatagtagctcacacctgtaatcccagcactttgggaagccgaagcaggaagattgcttgatgccaggcattcaagaccagcatgggcatcatagtgagatcctgtctctacaaaaattaattaacattaaaaattaaaaagatggctggcatggtggctcactcctgtaatcccagtactttgggaggccaaggcatggtggtgcatgcctttagtcccagctactcgggaggctgaggcaggagaatcacttgaattcaggaggcggaggttacagagagccgagatggtgccactgcactccagcctgggcgacagaacgagactctgtctgaaaaaaaaaaagaaaattaaaaagaccagaataaagctaaagatttaaaatagcctataggttcctaccagaagttaccagctacctctctgatagtctttccctacaatatcctcctggattattacattttagcaccttgacctatctgatgtcctgcatacacaggcatggtcctgctcagggtttgccttctctgctccctctttcttggaatgctcttcccctaattgttgcatagtgtgtttctttacattattaagctatcctctagtctcacctcagtgaaacctttcctgactccccccatgtacatctcacccccacatagatattgaactacctgtttccccttaccctgcttaatttttctctttaatgcacttattcccatgtattctttaattccgtatcaactgtctaccacactagaatatgagctctatgagagcaggctttattttgtaaactgctacatttctatctcctagaatagtacttgaatatagtagtagatacttaataaacacttgttatattagtataataaatgaactaatctcaggaatgccttggttttgtggatagacaggtagggatgggaacttgggtgatgtattttctgaagtttttatttttaagcttattattattttgagatggagtccagctctgtcgcccaggttggagtacagtggcgcgatcttggctcactgcaacgtgcacttccccggttcaagcgattctcctgccttagcctcccaagtagctgggattacaggcgcatgccaccatgcccagttagttttggtatttttagtagagacagcgtttcactgtgttggccaggctggtctcgaaatcctgacctcatgatccgcccgcctcggcctcccaagtgctgggattacaagcatgagcccccgtgtctggccttattttcttttttttgagacagagtcttcctctgtcacctaggctggagtgcagtggcacgatattggctcactctgcaacctccacctccaggattcaagtgatccttctaccttagtctccaaagtagctgagaccacaggcatgcgccaccacgcccggctaatttttgtatttttagcgtagacagggtttcaccatattgtccaggatgatctggaactcctgagctcaggtgatccacccacctcagcctcccaaagtgctaggattacaggcatgaggcaccatgcccggccttaagcttatcattttctaaatttcctttagtgagtacttattacactgtttttacaaagtaatcacaaaccaaacatcatgcctcttctgaagtgatctaataagagtacacagtaccatctgtaaagtgttcttgccagaaagttgaacctgaatgattaagcctgtaagtctagtttataggaaataaggctagaggaacaagttaaacctcaccatagggttatacaatcagcaaaatccagaatgggggaaactccacaggtcaaatgacctaattttaaaaataaatgacaagggagaaaaagtaagagacacctatagatcagaagacacttggggctgggcatggtggctcacacctgtaatcccagcactttgggaggccaaggcaggcggatcacctgaggtcaggagttcaagaccagccggccaacatggtgaaaccccaactctactaaaaatacgaaaaatcagccgggcgtggtggcgcacgcctgtagttccaactacctgggaggctgaggcaggagaatcacttgaacttgggaggcagaggttgcagtgagccgagatcgcaccattgcatgccagtctgggctacaaaagcaaaaccccatctcaaaaaaaagaagacacttgggtttgggtgtgttggctcatgcctgtaaaccccgtgctgggaggattgcttgagcccaggagttcaaggctgcagtgaggtatgtttgcaccactgcactccagcctaggtgacagagtgtgaccttatcttaaaagtaataataattaaaataatctggggtaggggtggatatgggtgaaacagcttggccatgagttgatggttgttggaccagggtgatggtccatatagttcattttattattttatttacttgaaattttgaaatacttgaaattttccatattaagttaaaaaggcatttacagtaaacaaaaaaaagttctaggaaggaattcaaaagaaatataagcagaaaattttgtctttatggagcttaaagatgagatgtgcacccacagtgatagtgcagaaaaatatatcactggaaatgaattcgtacgaactattatcaactaatcttttaaatgctgatgatagtatagagtattgaagggatcaatataattctgttttgatatctgaaagctcactgaaggtaaggatcgtattctctgctgtattctcagttcctgacacagcagacatttaataaatattgaacgaacttgaggccttatgttgactcagtcataacagctcaaagttgaacttattcactaagaatagctttatttttaaataaattattgagcctcatttattttctttttctccccccctaccctgctagtctggagttgatcaaggaacctgtctccacaaagtgtgaccacatattttgcaagtaagtttgaatgtgttatgtggctccattattagcttttgtttttgtccttcataacccaggaaacacctaactttatagaagctttactttcttcaattaagtgagaacgaaaaatccaactccatttcattctttctcagagagtatatagttatcaaaagttggttgtaatcatagttcctggtaaagttttgacatatattatctttttttttttttttgagacaaagtctcgctctgtcgcccaggctggagtgcagtggcatgatcttggctcactgcaacctccgccccccgagttcaagcgattcttctacctcagcctcccaggtagctgggactacaggcacccgccaccatgcttggctaatttttgtacttttagtagagataaggtttcaccatattggccaggctggtctcgaactcctgaccttgtgatccacctgcctcggcctcccaaagttctgggattacaggcgtgagccaccacacccgactgacatatattatctattaggatgtaacatcattttgaacagtgttttgtattttttgtgtccatcagtgaaagcaaactgcaagcagttttgaaataagcacattgtgtttgagccttcccagtttctcctttctgttcatttctgcatatccttatgcattcccccttctaagggtcagtgtttgcccgctttgtaatcattgtgaagacaggaaaggacctgataccagtttctatttaggccaaaattcatttatagcagtgattcaagttatatttacgtatttgatgatcttgtcttttgaaatgaaaatgtttgtttcttaataaaagaatttcagaaaaagtagagtaggtaatttagtagaacaagtgggctttctccttttctttatgttaagctatggctcacatcttaccttaaatgtcaactaatttgtttttaagtatttatgtacctggtacataacctggtaccaggtacaaactatgtacttggtaaaaagtttattagcacaaaaaggtatatgatgcaaagtatacttccctcttaccctacaacccctgcctccctgttccctccccagacaaccacaatgatcaatttcttatgtatcctttgaggaatttttaaattccagagttcttaacttggggtttatgaatagtctttatgaatttcctagaattatatttaaattgtattcaaaactatggccatgtacatttttctgggaagatagtccataattttcatctgagtgagctaagatcatgccactgcattccagcctgggcgacaagagggagactcaaaaaaaaaaaaaaaagtcccagtatttactacagagagctaaagattaacctttaaagccctggggctttcaatttatctggatgagaatctttctggaatgaactgtatgttttcttgtcagcttgagtaacaaatgctgaacatactatactattattacagggactcaagggcccagtgtggtagctcctgcccataaccccagcactttgggaggccaaggcaggaagatcacttaaggccaggagttcgaagctgtagtgagctatgatcacaccactgcactccagcctagatgacagagtgagaccctgtctttttttttttttgagatggtgtttcactctattgcccaggctggagtgcagtggtgtgatctcggctcactgcaacctccacctcctgggttcaagcgattctcctgcctcagcctcttgagtagctgggattacaggcatctgccaccacacccagctaatttttgtatttttagtcgagacagggttttcaccatgttggccaggctgctctcaaactcctgacttcagctaccttggccttaaaaagtgttgggattacaggtgtaagccaccgcgcctggctgaccctgtctcttaacaaaaaaagagagattaagttatgaatatagttgctttgagaacttgtggaagaaggaaattataggcttataggcagagataataatacgagcaaatgtacaaataaaagaaaatagaggacgggcgcggtggctcacgcctataataccagcactttgggaggtcgaggtgggcggatcacgaggtcaggaaattaagaccatcctggccaaaatggcgaaacactgtctctactaaaacacacaaaaaactagcctggcatggtggcacgtacctgtagtcccagctacttggtaggctgcggcaggggtatcacttgaacctgggaggcagaggttgccctgagccgagatcatgccaatgcactccagcctgacaacagagtgagactctgtctgaaaaaaaagaaaagaaaagaaaatacatccaggaaaaataagctaactttgcatatgtgtataggagttgtgttagaaaaggaagaagccctcaaagatgggaagccatttgcaagaaagagaaggtccaagaggaggcagaagggattggaaatagaaaaaggatgtaagaaagagttgattattactcataaacagtaatgaaggaaaaggagagtaattctacaggaagatgctgaggtgctttgagcccagtgaagttggaggtaaagacagctgttgaggccgggcacggtggctcacgcctctaatcctagcacttttggagcccaaggcaggtggatcacctgaggtcaggagctcaagaccagcctgaccaacatagagaaaccccatctctactaaaaatacaaaattagacgggcgtggaggcgcatgcctgtaatcccagttacttgggaggctgaggcaggagaatcacttgaacctgggaggcggaggttgcagtgagccgagattgcgccattgcactccagcctgggcgacaagagtgaaaactgtctcaaaaaaaaaaaacaacaaaaaacagctgttgagattgagaggattagagttggcaactggagaagagtgagaagcttggtttcaagcttgtgatagtcaggattgtgatagtcaggaaagaaccagtcataaagatatatgtgtgtgtatacatataaatatgttatatatatgtgtgtgtgtgacacatatatatttttgtttgtttctttgagacagtgtctccctctgacacccaggctggagttcagtggtgtgatcatagttcacttttaccttgcaatctgggttcaagcaatctctcatctcagcccctcaagtagctaggactacaggtacatggcatttgcccagctaatttttaagtttcttgtagagatgggccagccatattttaaattgtgttttgaatgttatattagaattaaaagtccaaagccgggtgtggtggctcacgcctgtaatcccagcactttgggaggctgaggtgggcggatcacgaggtcaggagttcgagaccagcctggccaatatggtaacaccatctctactaaaaatacaaaaattagctgggtatgggggcacatgcctgtagtcccagctactcaggaggctgaggcagaggaacctcttgaacccaggaggcagaggctgcagtgagttgagatcgtgccactgtactctagcctgggcgacagagcaagattccgtctcaaaaaaaaaaaaagtccagtataatgcccatgtgatagatcgactttttcatgaaatctcttctgtaatatcaatataatctgaataacactttgatctatatgatgagaaagctgggagcctgggagcgatacccccatgcttttgttgtattaattgtattttctacggataaactctaattgctaaaaataaaacaactttattgacccaagcaagcctaaagttctgaaatcttttttttatttttgtttgtttgtttgtttgtttttgtttgttttgttttgagacggagtctcgctctgtcgcccaggctggagtgcggtggtgcagtctcggctcactgcaagctccacctcccgggttcacaccattctcctgcctcagcctcccaagtagctgggactacagacgcctgccaccacgcccagctaatttttttgtatttttagtagagaaagggtttcaccgtgttagccaggatggtctcgatctcctgacctcgtgatctgcccgccttggcctccctaagttctgggattacaagtgtgagccaccacgcccggctgtttttttttgttttgttttgagacggagtctcactgtgttgcccagactggagtgcagtggcatgatctcagctcactgccacctccatctcctgggttcaagcaaatctcctgcctcagcctcccgagtagctgggactacaggcatgtgccaccacacctggctaatttttgtatttttagtagagacggggtttcactatgttggccaggctggtccaaaactcctgacctcaggtgatctgctcgccttggcctcccacagtgccaggattacaggcatgagccaccttgcccagccagttctgaaatcttttatgaagcctataaaaaaagataataataccaatctagaaaatatttcttaaggcagtcatgcattagtttgaactttccaaacaaaaaaatgcaatgtgtaatacttttttttttttttttgagatggagtcttgttctgttgcccaggctggagtgcagtggtacaatctcggctcactgcagcctctgcctctctggttcaagtgattctcctgcctcagcctcccaagtagctgggattacaggcgtgcaccaccatgcatggctaatttttgtatttttagtagagacagggtttcaccatgttgacaaggctgatctcgaactcctgacctcaggtgatccgcccacctcagcctcccaaagtgctgagattacaggcattagccaccacgcccagccttttattttagtagagaccatgtttcaccatgttgaccaagctggtcttgagctgacctcaagtgatccgcccacctccacctcccaaaatggtgggattataggcatgagccaccgcacccagcctgtaatacttttttgaagatctagaaccacattgttcaaagagatagaatgtgagcaataaatgtaacttaaatttttcaacagctactttttttttttttttttgagacagggtcttactctgttgtcccagctggagtacagtggtgcgatcatgaggcttactgttgccttgacctcctaggctcaagcgatcctatcacctcagtctcccaagtagctgggactgtaagtgcacaccaccatatccagctaaattttgtgttttctgtagagacggggtttcgccatgtttcccaggctggtcttgaactttgggcttaacccgtctgcccacctaggcatcccaaagtgctaggattacaggtgtgagtcatcatgcctggccagtattttagttagctctgtcttttcaagtcatatacaagttcattttcttttaagtttagttaacaacctttatacatgtattctttttctagcataaagaaagattcgaggccgggtgcggtggctcacgcctgtaatcccagcactttgggaggctgagatgggcacatcacgaggtcaggagatcgagaccatcctggctaacatggtgaaaccccgcctctactaaaattacaaaaagttagccaggcgtggtagcgggcacctgtagtcccagctactcaggaggctgaggcaggagaatggcgtgaacccaggaggcagagcttgcagtgagcagagattgtgccactgcactccagcctgagagacagagcgagactccgtctaaaaaaaaaaaaaaagattcgaatccttatcttggttgatttttgcgtatctagttccactgaattatttatataattgtatagactacagcacgagacagcttagcttgtcactctactgtactatattctgcagtactatcataagggaatttcctccctacccctgctctgaattgttcaattgtactatttgctggagtaatgcttgatgccttcttgatccattatactagagtatatgtagtatttgtagattctgaaggagtgggagcctctattctgagttttaaaggtacttatgtacagtggaggtagctttttgacagcctcatcttccaaactatagagtcattgttttgttgagtgcaatatggtacttgaagcatctatatcggcgaagaaggacccaagtctccttgaccttacctacctacattcactttctctggtaggaagattgtgggtgcctctctccagacttagtttccatgtcaaaaaagaaaaaaggaagattgtgggctttgctacaatccaattctggatccaatataaccttcattgcttaattactgtgtgatctgggacaagcctctactctataaaaatgaagataaggccaggcttgatggctcatgcctgtaatcccagcacgttgggatgccaaggcaggaggatcacttgaggtcaggagttcgagaccagactgggcaatatagtgaaaccacatctgtacaaaaataaagatagaaagtagcccagcgcaatggctcacacctgtaatcccagcactttgggaggctgaagcaggcgatcacttgaggtcgggagttcaagactgtagacagatagataggtaggtagatagatagagatatagatatagttggggtttttttgttttgttttgttttgtttttgagatggagtttcgctcttgttgcccaggctggagtgcaatggcgcgatctcagtttactgcaacctccgcctcccgggttcaagagattctcctgcctcagcctcctgagtagccaggattacaggcatatgccaccatgcccggctaatttttgtatttttagtagagacagggtttctccgtgttggtcaggctggtcttgaactcctgacctctcccaaagtgttgggattacaggcgtgagccaccgctcctggccttttttttttttttttttttttttttgagacagagtcttcctctgttgcccagggtggagtgcagtggcactcttctcagctcattgcaacctctgccatcctgggttccagtgattctcatgcctcagcctcccaagtagctgggactcaggcgtgtgcccaccacgcctggctaattttgttgtatttttagtagagacagggtttcaccatgttagccaggctggtctcaaactccaggcctcaagtgatctgcctgcctcagcctcctgggattgcagacatgagccactgcacccggccaagagagggtaataaatgttaaattacctggctagtaaaaaatattctctaagtgtcttttctcacaattcccaatgccttttttttttttttggcacaatctcactctgttgcccaggctggaatgcaatggtgcaatattggctcactgtaacccccgcctcacaggttcaacttattctcatgcctcagcctcccgagtaactgggactacagtgcaccaccaccacacccagctaatttttgaatatttagtagagacagggtttcaccatgttggccaggctggtcttgaactcctggcctcaagtgattcacccaccccgcaagtgctgggattacaggtgtggaccaccgtgcacagccctagtgactttttttttagccccttaatcttttctttcctgggtctcttcattgtcagtgtctgctatttactccctacctagtcacccccttcaccagtatattatgtcctttatgttttattttgcaggatcttattttgcttttctattgaatcccctccatctagaatagtactagacatagtaaatattggttgtatgagtgaatcgctgcttttaattatcatcaccattgctctctctacttctggtctatgatccactttgagttaacttttgttatttggtgtgagataggagtataatttcattcttttacatgtggttatacttttgtctcaacactgtttgttaaaaacacaaaaagtattattttcccatttaatcatctttggcctgggcacggtggctcatgcctgtaatcccagcactctggaaggccaaggcagatggatcaatttgaggccaggagttcaagactagccaacatggtgaaactaaaaatacaaaaaattagctgggtatggtggtgcatgtctgtaatcccagctactcgggaggctgaggcacgagaattgcttgagcctaggaggtggaggttgtagtgagctgagattgtgtcactaccctccagcctgggtgatagagtgagtctgtctcaaaaaaaaaaaaaaaaaattaagaaaataaaaatcgtcggccaggcatggtggctcacacctgtaatcccagcactttgggaggcagaggcgggcagatcacgaggtcaggagatggagaccatcctggctaacatggtgaaaccccgtctctactaaaaataaaaaaattagccgggcatggtgctgggcgcctgtagtcccagctgctcgggaggctgaggcaggagaatggcgtgaacccaggaggtggagcttgcagtgagccgagatcgtgccactgcactccagcctgggagacagagcgagactccgtctcaaaaaaaaaaaaaaaaaaaattgtcttggtatttattattgttgaaaatcgcttgatcacagatgtatgtatgagtttatttctgtactgtcaattccattttattgatgtatgtgtctattcttatgctattaccacactttcttgattactatagctttgtggtgaggtgttgagattttaaactaattataagcatcttacatgaactacttaccgtttatatttgattatgcagcatgaaataattatgaatatatcattaaatatgccatattaacttttattaagttttatgtgatcataacagtaagccatatgcatgtaagttcagttttcatagatcattgcttatgtagtttaggtttttgcttatgcagcatccaaaaacaattaggaaactattgcttgtaattcacctgccattactttttaaatggctcttaagggcagttgtgagattatcttttcatggctatttgccttttgagtattctttctacaaaaggaagtaaattaaattgttctttctttctttataatttatagattttgcatgctgaaacttctcaaccagaagaaagggccttcacagtgtcctttatgtaagaatgatataaccaaaaggtatataatttggtaatgatgctaggttggaagcaaccacagtaggaaaaagtagaaattatttaataacatagcgttcctataaaaccattcatcagaaaaatttataaaagagtttttagcacacagtaaattatttccaaagttattttcctgaaagttttatgggacatctgccttatacaggtattagaaacttactgcctttctctaatgcttctagtgtaaaaacttgcagacttatgtaaagtagggctgtatcgccgtgcccccattgtctgttaatcttgtttttatatttttgattgtgtttccttttctttttttttttttttttaagacagggtcctgctctgtcactgaggctggagtgcagtggcgtgatctcggctcactgtagcctctgtctcccagcctcttcctgccttagcctcccaaatagctgggactacaggcacacgctaccatgcccggccaatttttgtattttttgtagagatgaggttttaccatgttgcccaggctggtaactcctgagctcaggtgatctgcccacctcggcctcccaaagtgctggggttcacaggtgtgtgtttatttctatctaattatttacacaaacacaatgtatttatatattgtgtatctcttctgctacaatgtaaattctatgagagtagtaattttgtctgtctcaacactgtttttcctaagtttggtacatagtaggcactcagatgcttaaaggaatgaatgaattgtgctttaattccactttactaaacccaaatctccctttggacattgttatctatgtgttttcaaagaagtataatcataatttgacagaaatccttgagaggcagaactaagtgagggattgggcagggttcagatgttaagaacagtaagctcagcagggtgtgattgctcatgcctataaccctagcactctaggaggctgaggtgggatgattgcttgaggccaggagtttgaaatcagcctgggcaacatagtgagaccccatcactaccaacaaaataaataaataaatgtacatggtggcatatgcccatagtcctagctacttgggaggctatagtgggaggatagcttgagtacagaagtctgaggctgcagtgagctatgattgtggcactgcatgctagcctgggcaatagagcaagaccctgtctctaaattaaacaaaaaaaaaagtactctagttttctatgcaatgcattatatctgctgtggatttagggcagtattatatcagataattttaggcatttggtaggcttaaatgaatgacaaaaagttactaaatcactgccatcacacggtttatacagatgtcaatgatgtattgattatagaggttttctactgttgctgcatcttatttttatttgtttacatgtcttttcttattttagtgtccttaaaaggttgataatcacttgctgagtgtgtttctcaaacaatttaatttcaggagcctacaagaaagtacgagatttagtcaacttgttgaagagctattgaaaatcatttgtgcttttcagcttgacacaggtttggagtgtaagtgttgaatatcccaagaatgacactcaagtgctgtccatgaaaactcaggaagtttgcacaattactttctatgacgtggtgataagaccttttagtctaggttaattttagttctgtatctgtaatctatttttaaaaaattactcccactggtctcacaccttattttatcaatcgtaaggtgcacatttttcacatcttaacatctctgaaattgggaacattttactattgagggtgtgtcatttgtttaatttgtgtgctttctttcttagtgatacagaaaataatagtgcaacttacattgttggtgtcttagctttagtgaaatacagtattgataggcaaatttcttagtgttaaggtagaaaacaaggactctaaataactttgatggtctgtgtatttgtttttgtttcctaggagtaaaatttccagttgattttttaaaatttgatttttaaaaaaaatcacaggtaaccttaatgcattgtcttaacacaacaaagagcatacatagggtttctcttggtttctttgattataattcatacatttttctctaactgcaaacataatgttttcccttgtattttacagatgcaaacagctataattttgcaaaaaaggaaaataactctcctgaacatctaaaagatgaagtttctatcatccaaagtatgggctacagaaaccgtgccaaaagacttctacagagtgaacccgaaaatccttccttggtaaaaccatttgttttcttcttcttcttcttcttcttttcttttttttttcttttttttttttgagatggagtcttgctctgtggcccaggctagaagcagtcctcctgccttagcccccttagtagctgggattacaggcacgcgccaccatgccaggctaatttttgtatttttagtagagacggggtttcatcatgttggccaggctggtctcgaactcctaacctcaggtgatccacccacctcggctccccaaattgctgggattacaggtgtgagccactgtgcccggccggtaaaaccattttcatttattctggcaacatctctttattgagcattgtgaatatgttagtgaatgtgctagatgctcatagatttatataaaaagttagtgaagaaggaaagatggtatattaagtggttagacaagtgttctaatcagttagagttcagagaaggtcagggtacctgatataatcaagagagagaccttacagccaggtgaggtgaatgtacctataatcccagctacttaggaggctgaaatgggaggatcacttgagtccaggtttgagaccagcccaggcaacatagcaagatccccatcagatacaccaaaaagacagatttcttttttttttttttttttgagacagagtctcgctctgtcgcccaggctggagcgcagtgacacgatgtcagctcactgcaacctccgcctcccaggttcaagtgattctcctgcctcagcctcctgagtagttgggactacaggggtacgacaccagacctggctaatttttgtaattttagtagagtcggggtttcaccatattggtcaggctggtctcgaactcctgacctcaggtgatccaccctccttggcctcccagagtgctgggattacaggcgtgagccaccaagcccggccaaaaaagagagctcttataggcccttccttgctttggagctttatctgctctgtgatgcttatctaaaatagccataaggtcactgatatttttaagcatttggaaattacttcagctgggtgccatggctcatgcctataatcccaaccctttgggaggctgaggtaggaggtcctttgagcccagcttgggcaacacagtgagacactgtctctgcaattaaaaaaaaaaaaaagtagctgggtgccgtggctcacgcctgtaattccagcactaggaggcttgaggattgcctgagctcaggagttcaagaccagtttgggcaacatagcaagtccttgtctatattaaaagtttttttaaattatctgggcatggtggtgtgtgcctgtagtcccagctacttgggaagctgagacagaaggatcacttgagtccaggagatgtagactacagtgagctatgatcactccactgcacttcagcgtgggcggcaaagcaagatctagttgcaaaaaaaaaaagaactggctgggtgcggcggctaacacctgcaatcccagcaccttgggaggctgaggccagtggatcatgaggtcaggagattgagaccaccctggccaacatggtgaaacccggtctctactaaaaatacaaaaattagctgggtgtggtggcacgtgcctgtaatcccagctactccagaggctgaggatggagaatcacttgaacctgagagtcggaggttgcagtgagccgagattgcgccactgcactccagcctggcgacagagcgagactccgtctcaaaaaaaaaaaaaaaaaagcttcacgcctgtaatcccagcactttgggaggccgagtcaagtggatcacgaggtgtggagatcaagactatcctggctcacatggtgaaagcccgtctctactaaaaacacagaaaaattagctgagcgtgatggcggactcctgtagtcccagctactcgggaggctgaggcaggagaatagcatgaacccgggaggtggagcttgcagtgagccgagatcccgccactgcgatccagcctgggcgacagagtgagactctgtctcaaaaaaaaaacaaaaaaacttagctgggcgtggtggtatgcacctgtggtcctagctacttgggaggctgaggctggagcattgctttaacatagagagtcaaggctgcagttgagctatgactgtgccactggactccagcgcaggtgactgagaccctatcttttaaaaaaagggaaaattacttgaacttaaaaggtgtaattgttaaagaaaatgtagtgatttgctctgttgttacttatatgtgcatgaatgatggagatcttaaaaagtaatcattctggggctgggcgtagtagcttgcacctgtaatcccagcacttcgggaggctgaggcaggcagataatttgaggtcaggagtttgagaccagcctggccaacatggtgaaacccatctctactaaaaatacaaaaattagctgggtgtggtggcacgtacctgtaatcccagctactcgggaggcggaggcacaagaattgcttgaacctaggacgcggaggttgcagcgagccaagatcgcgccactgcactccagcctgggccgtagagtgagactctgtctcaaaaaagaaaaaaaagtaattgttctagctgggcgcagtggctcttgcctgtaatcccagcactttgggaggccaaggcgggtggatctcgagtcctagagttcaagaccagcctaggcaatgtggtgaaaccccatcgctacaaaaaatacaaaaattagccaggcatggtggcgtgcgcatgtagtcccagctccttgggaggctgaggtgggaggatcacttgaacccaggagacagaggttgcagtgaaccgagatcacgccaccacgctccagcctgggcaacagaacaagactctgtctaaaaaaatacaaataaaataaaagtagttctcacagtaccagcattcatttttcaaaagatatagagctaaaaaggaaggaaaaaaaaagtaatgttgggcttttaaatactcgttcctatactaaatgttcttaggagtgctggggttttattgtcatcatttatcctttttaaaaatgttattggccaggcacggtggctcatggctgtaatcccagcactttgggaggccgaggcaggcagatcacctgaggtcaggagtgtgagaccagcctggccaacatggcgaaacctgtctctactaaaaatacaaaaattaactaggcgtggtggtgtacgcctgtagtcccagctactcgggaggctgaggcaggagaatcaactgaaccagggaggtggaggttgcagtgtgccgagatcacgccactgcactctagcctggcaacagagcaagattctgtctcaaaaaaaaaaaacatatatacacatatatcccaaagtgctgggattacatatatatatatatatatatatattatatatatatatatatatatgttatatatatgttatatatatataacatatatatatgttatatatatgttatatatatataatatatatatgttatatatatgttatatatatatatacacacacacacacatatatatgtatatatatatacacacacacacacaaattagccaggcatagttgcacacgcttgtagacccagctactcaggaggctgaggcaggagaatctcttgaacttaggaggcggaggttgcagtgagctgagattgcgccactgcactccagcctgggtgacagagcaggactctgtacaccccccaaaacaaaaaaaaaagttatcagatgtgattggaatgtatatcaagtatcagcttcaaaatatgctatattaatacttcaaaaattacacaaataatacataatcaggtttgaaaaatttaagacaacagaaaaaaaaattcaaatcacacatatcccacacattttattattactactactattattttgtagagactgggtctcactctgttgcttatgctggtcttgaactcctggcctcaagcagtcctgctccagcctcccaaagtgctgggattataggcatgagctaccgctcccagccccagacattttagtgtgtaaattcctgggcattttttccaggcatcatacatgttagctgactgatgatggtcaatttattttgtccatggtgtcaagtttctcttcaggaggaaaagcacagaactggccaacaattgcttgactgttctttaccatactgtttagcaggaaaccagtctcagtgtccaactctctaaccttggaactgtgagaactctgaggacaaagcagcggatacaacctcaaaagacgtctgtctacattgaattgggtaagggtctcaggttttttaagtatttaataataattgctggattccttatcttatagttttgccaaaaatcttggtcataatttgtatttgtggtaggcagctttgggaagtgaattttatgagccctatggtgagttataaaaaatgtaaaagacgcagttcccaccttgaagaatcttactttaaaaagggagcaaaagaggccaggcatggtggctcacacctgtaatcccagcactttgggaggccaaagtgggtggatcacctgaggtcgggagttcgagaccagcctagccaacatggagaaactctgtctgtaccaaaaaataaaaaattagccaggtgtggtggcacataactgtaatcccagctactcgggaggctgaggcaggagaatcacttgaacccgggaggtggaggttgcggtgaaccgagatcgcaccattgcactccagcctgggcaaaaatagcgaaactccatctaaaaaaaaaaaagagagcaaaagaaagaatatctggttttaaatatgtgtaaatatgttttggaaagatggagagtagcaataagaaaaaacatgatggattgctacagtatttagttccaagataaattgtactagatgaggaagccttttaagaagagctgaattgccaggcgcagtggctcacgcctgtaatcccagcactttgggaggccgaggtgggcggatcacctgaggtcgggagttcaagaccagcctgaccaacatggagaaaccccatctctactaaaaaaaaaaaaaaaaaaattagccggggtggtggcttatgcctgtaatcccagctactcaggaggctgaggcaggagaatcgcttgaacccaggaagcagaggttgcagtgagccaagatcgcaccattgcactccagcctaggcaacaagagtgaaactccatctcaaaaaaaaaaaaaaagagctgaatcttggctgggcaggatggctcgtgcctgtaatcctaacgctttggaagaccgaggcagaaggattggttgagtccacgagtttaagaccagcctggccaacataggggaaccctgtctctatttttaaaataataatacatttttggccggtgcggtggctcatgcctgtaatcccaatactttgggaggctgaggcaggtagatcacctgaggtcagagttcgagaccagcctggataacctggtgaaacccctctttactaaaaatacaaaaaaaaaaaaaaattagctgggtgtggtagcacatgcttgtaatcccagctacttgggaggctgaggcaggagaatcgcttgaaccagggaggcggaggttacaatgagccaacactacaccactgcactccagcctgggcaatagagtgagactgcatctcaaaaaaataataatttttaaaaataataaatttttttaagcttataaaaagaaaagttgaggccagcatagtagctcacatctgtaatctcagcagtggcagaggattgcttgaagccaggagtttgagaccagcctgggcaacatagcaagacctcatctctacaaaaaaatttcttttttaaattagctgggtgtggtggtgtgcatctgtagtcccagctactcaggaggcagaggtgagtggatacattgaacccaggagtttgaggctgtagtgagctatgatcatgccactgcactccaacctgggtgacagagcaagacctccaaaaaaaaaaaaaaaagagctgctgagctcagaattcaaactgggctctcaaattggattttcttttagaatatatttataattaaaaaggatagccatcttttgagctcccaggcaccaccatctatttatcataacacttactgttttccccccttatgatcataaattcctagacaacaggcattgtaaaaatagttatagtagttgatatttaggagcacttaactatattccaggcactattgtgcttttcttgtataactcattagatgcttgtcagacctctgagattgttcctattatacttattttacagatgagaaaattaaggcacagagaagttatgaaatttttccaaggtattaaacctagtaagtggctgagccatgattcaaacctaggaagttagatgtcagagcctgtgctttttttttgtttttgtttttgttttcagtagaaacgggggtctcactttgttggccaggctggtcttgaactcctaacctcaaataatccacccatctcggcctcctcaagtgctgggattacaggtgagagccactgtgcctggcgaagcccatgcctttaaccacttctctgtattacatactagcttaactagcattgtacctgccacagtagatgctcagtaaatatttctagttgaatatctgtttttcaacaagtacatttttttaacccttttaattaagaaaacttttattgatttattttttggggggaaattttttaggatctgattcttctgaagataccgttaataaggcaacttattgcaggtgagtcaaagagaacctttgtctatgaagctggtattttcctatttagttaatattaaggattgatgtttctctctttttaaaaatattttaacttttattttaggttcagggatgtatgtgcagtttgttatataggtaaacacacgacttgggatttggtgtatagatttttttcatcatccgggtactaagcataccccacagttttttgtttgctttctttctgaatttctccctcttcccaccttcctccctcaagtaggctggtgtttctccagactagaatcatggtattggaagaaaccttagagatcatctagtttagttctctcattttatagtggaggaaataccctttttgtttgttggatttagttattagcactgtccaaaggaatttaggataacagtagaactctgcacatgcttgcttctagcagattgttctctaagttcctcatatacagtaatattgacacagcagtaattgtgactgatgaaaatgttcaaggacttcattttcaactctttctttcctctgttccttatttccacatatctctcaagctttgtctgtatgttatataataaactacaagcaaccccaactatgttacctaccttccttaggaattattgcttgacccaggtttttttttttttttttttggagacggggtcttgccctgttgccaggatggagtgtagtggcgccatctcggctcactgcaatctccaactccctggttcaagcgattctcctgtctcaatctcacgagtagctgggactacaggtatacaccaccacgcccggttaattgaccattccatttctttctttctctcttttttttttttttttttgagacagagtcttgctctgttgcccaggctggagtacagaggtgtgatctcacctctccgcaacgtctgcctcccaggttgaagccatactcctgcctcagcctctctagtagctgggactacaggcgcgcgccaccacacccggctaatttttgtatttttagtagagatggggtttcaccatgttggccaggctggtcttgaactcatgacctcaagtggtccacccgcctcagcctcccaaagtgctggaattacaggcttgagccaccgtgcccagcaaccatttcatttcaactagaagtttctaaaggagagagcagctttcactaactaaataagattggtcagctttctgtaatcgaaagagctaaaatgtttgatcttggtcatttgacagttctgcatacatgtaactagtgtttcttattaggactctgtcttttccctatagtgtgggagatcaagaattgttacaaatcacccctcaaggaaccagggatgaaatcagtttggattctgcaaaaaagggtaatggcaaagtttgccaacttaacaggcactgaaaagagagtgggtagatacagtactgtaattagattattctgaagaccatttgggacctttacaacccacaaaatctcttggcagagttagagtatcattctctgtcaaatgtcgtggtatggtctgatagatttaaatggtactagactaatgtacctataataagaccttctgtaactgattgttgccctttcgtttttttttttgtttgtttgtttgtttttttttgagatggggtctcactctgttgcccaggctggagtgcagtgatgcaatcttggctcactgcaacctccacctccaaggctcaagctatcctcccacttcagcctcctgagtagctgggactacaggcgcatgccaccacacccggttaattttttgtggttttatagagatggggtttcaccatgttaccgaggctggtctcaaactcctggactcaagcagtctgcccacttcagcctcccaaagtgctgcagttacaggcttgagccactgtgcctggcctgccctttacttttaattggtgtatttgtgtttcatcttttacctactggtttttaaatatagggagtggtaagtctgtagatagaacagagtattaagtagacttaatggccagtaatctttagagtacatcagaaccagttttctgatggccaatctgcttttaattcactcttagacgttagagaaataggtgtggtttctgcatagggaaaattctgaaattaaaaatttaatggatcctaagtggaaataatctaggtaaataggaattaaatgaaagagtatgagctacatcttcagtatacttggtagtttatgaggttagtttctctaatatagccagttggttgatttccacctccaaggtgtatgaagtatgtatttttttaatgacaattcagtttttgagtaccttgttatttttgtatattttcagctgcttgtgaattttctgagacggatgtaacaaatactgaacatcatcaacccagtaataatgatttgaacaccactgagaagcgtgcagctgagaggcatccagaaaagtatcagggtagttctgtttcaaacttgcatgtggagccatgtggcacaaatactcatgccagctcattacagcatgagaacagcagtttattactcactaaagacagaatgaatgtagaaaaggctgaattctgtaataaaagcaaacagcctggcttagcaaggagccaacataacagatgggctggaagtaaggaaacatgtaatgataggcggactcccagcacagaaaaaaaggtagatctgaatgctgatcccctgtgtgagagaaaagaatggaataagcagaaactgccatgctcagagaatcctagagatactgaagatgttccttggataacactaaatagcagcattcagaaagttaatgagtggttttccagaagtgatgaactgttaggttctgatgactcacatgatggggagtctgaatcaaatgccaaagtagctgatgtattggacgttctaaatgaggtagatgaatattctggttcttcagagaaaatagacttactggccagtgatcctcatgaggctttaatatgtaaaagtgaaagagttcactccaaatcagtagagagtaatattgaagacaaaatatttgggaaaacctatcggaagaaggcaagcctccccaacttaagccatgtaactgaaaatctaattataggagcatttgttactgagccacagataatacaagagcgtcccctcacaaataaattaaagcgtaaaaggagacctacatcaggccttcatcctgaggattttatcaagaaagcagatttggcagttcaaaagactcctgaaatgataaatcagggaactaaccaaacggagcagaatggtcaagtgatgaatattactaatagtggtcatgagaataaaacaaaaggtgattctattcagaatgagaaaaatcctaacccaatagaatcactcgaaaaagaatctgctttcaaaacgaaagctgaacctataagcagcagtataagcaatatggaactcgaattaaatatccacaattcaaaagcacctaaaaagaataggctgaggaggaagtcttctaccaggcatattcatgcgcttgaactagtagtcagtagaaatctaagcccacctaattgtactgaattgcaaattgatagttgttctagcagtgaagagataaagaaaaaaaagtacaaccaaatgccagtcaggcacagcagaaacctacaactcatggaaggtaaagaacctgcaactggagccaagaagagtaacaagccaaatgaacagacaagtaaaagacatgacagcgatactttcccagagctgaagttaacaaatgcacctggttcttttactaagtgttcaaataccagtgaacttaaagaatttgtcaatcctagccttccaagagaagaaaaagaagagaaactagaaacagttaaagtgtctaataatgctgaagaccccaaagatctcatgttaagtggagaaagggttttgcaaactgaaagatctgtagagagtagcagtatttcattggtacctggtactgattatggcactcaggaaagtatctcgttactggaagttagcactctagggaaggcaaaaacagaaccaaataaatgtgtgagtcagtgtgcagcatttgaaaaccccaagggactaattcatggttgttccaaagataatagaaatgacacagaaggctttaagtatccattgggacatgaagttaaccacagtcgggaaacaagcatagaaatggaagaaagtgaacttgatgctcagtatttgcagaatacattcaaggtttcaaagcgccagtcatttgctccgttttcaaatccaggaaatgcagaagaggaatgtgcaacattctctgcccactctgggtccttaaagaaacaaagtccaaaagtcacttttgaatgtgaacaaaaggaagaaaatcaaggaaagaatgagtctaatatcaagcctgtacagacagttaatatcactgcaggctttcctgtggttggtcagaaagataagccagttgataatgccaaatgtagtatcaaaggaggctctaggttttgtctatcatctcagttcagaggcaacgaaactggactcattactccaaataaacatggacttttacaaaacccatatcgtataccaccactttttcccatcaagtcatttgttaaaactaaatgtaagaaaaatctgctagaggaaaactttgaggaacattcaatgtcacctgaaagagaaatgggaaatgagaacattccaagtacagtgagcacaattagccgtaataacattagagaaaatgtttttaaagaagccagctcaagcaatattaatgaagtaggttccagtactaatgaagtgggctccagtattaatgaaataggttccagtgatgaaaacattcaagcagaactaggtagaaacagagggccaaaattgaatgctatgcttagattaggggttttgcaacctgaggtctataaacaaagtcttcctggaagtaattgtaagcatcctgaaataaaaaagcaagaatatgaagaagtagttcagactgttaatacagatttctctccatatctgatttcagataacttagaacagcctatgggaagtagtcatgcatctcaggtttgttctgagacacctgatgacctgttagatgatggtgaaataaaggaagatactagttttgctgaaaatgacattaaggaaagttctgctgtttttagcaaaagcgtccagaaaggagagcttagcaggagtcctagccctttcacccatacacatttggctcagggttaccgaagaggggccaagaaattagagtcctcagaagagaacttatctagtgaggatgaagagcttccctgcttccaacacttgttatttggtaaagtaaacaatataccttctcagtctactaggcatagcaccgttgctaccgagtgtctgtctaagaacacagaggagaatttattatcattgaagaatagcttaaatgactgcagtaaccaggtaatattggcaaaggcatctcaggaacatcaccttagtgaggaaacaaaatgttctgctagcttgttttcttcacagtgcagtgaattggaagacttgactgcaaatacaaacacccaggatcctttcttgattggttcttccaaacaaatgaggcatcagtctgaaagccagggagttggtctgagtgacaaggaattggtttcagatgatgaagaaagaggaacgggcttggaagaaaataatcaagaagagcaaagcatggattcaaacttaggtattggaaccaggtttttgtgtttgccccagtctatttatagaagtgagctaaatgtttatgcttttggggagcacattttacaaatttccaagtatagttaaaggaactgcttcttaaacttgaaacatgttcctcctaaggtgcttttcatagaaaaaagtccttcacacagctaggacgtcatctttgactgaatgagctttaacatcctaattactggtggacttacttctggtttcattttataaaagcaaatccaggtgtcccaaagcaaggaatttaatcattttgtgtgacatgaaagtaaatccagtcctgccaatgagaagaaaaagacacagcaagttgcagcgtttatagtctgcttttacatctgaacctctgtttttgttatttaaggtgaagcagcatctgggtgtgagagtgaaacaagcgtctctgaagactgctcagggctatcctctcagagtgacattttaaccactcaggtaaaaagcgtgtgtgtgtgtgcacatgcgtgtgtgtggtgtcctttgcattcagtagtatgtatcccacattcttaggtttgctgacatcatctctttgaattaatggcacaattgtttgtggttcattgtctccttaaattagactgtaagcaccttgatggaactcatactaccttttatttcacacacacgcacacgcgcacacacagcctacacatacactgcctagctcattgtagcatactaaatactgattttaatgaataagctaaaccttcgaaacccatttgctaatcccagcactttgggaggccaaggtgggtggatcacctcaggtcagaagtttgagaccagcctggccaacatggtgaaaccccacatctactaaaaatacaaaaattagctgggcgtggtggccaatgccttgtaatcccagctattctggaggctgagacaggagaatcgcctgaacctgggaggcggaggttgcactgagctgggattgtaccactgcactccagcctgggtgacaaagtgagactccatctcaaaaacaaacaaacaaaaacacatcatttcccctatagcaaaaacatgacggcacttactgtatcaagagaggtgagaaaaaggagccacagcaggatgattcaagggactctgcatagctccattttaagaatatgcctactgcaggtcagagaaggtaagcaaactgcctaaggccacacagccaggtacagaactctcaccaatattattgccagcaatcgcaattttggtgtttattcttggtaccaagttggagactatagggttctcttcctaatagagaccatctagcctttcactgttttgtggatacttctttctcttcttctttttttttttcccttttaaaatctagttatttttttctttttggtttctttgacacagggtctcttactctgttacccaggctggaatggagtagtgcagtcatggttcactgtagctttgacttcctgggctcaagcgatcctcctacctcagcttcccgagtagctgggaccacaggcgcccaccaacacctccagctaatttttaagtttttactagagacaacatctcactatgttgcccaggctggtctcaaaatcctgggctcaagtgatcccacctcagcctcccaaaatgctgggattacaggtgtgtgcaaccacgcctggcctattttttttttaattgctcataaatcatcttttttctttaaaaaaaagaaagatgggaggctaaagcaggagaatcacttgaacccaggaggcggaggttgcagtgagctgagatcatgctgctgctctccagcctgggcaacaagagtgaaactccatctcaaaaaaaaaaaaaaagaaagtacacaattttactttctggacctaatggtcaaggccaataatttggtcacctatgaaataaataaaagctttaccatatatatgaccatttgataatgtaatatgaaatgtttatgtactaaaggcagaatagtctagaaaaaacattctgtatcacaacgtctaaaaatgaatatcatcttcatcatagaaccaggctctttctcctaatttttttttttgagatggagttttgctctgtcacccaggctggaatgcagtggcacaattttggctcactgcaaccttcagctcccaggttcaggatcaagtgattttcgtgcttcagccttctaagtagctgggattacaggtgactgccaccacacccagctcatttttttgtatttttttagtagagagagggtttcaccatgttggccaggctcgtctcgaactcctgacctcaaataatccacccgtctcagcctcccaaagtgctgagattacaggcgtgagccaccaggcctggcctcctaatttttatttgtagaagtggcaccaaaattttccaagttctcatgcaaaaattcaggctcatctcagtttatttttttcatttatttatctcccactaaattgacaacttctaataattaggttggttctttgtattcccagcacagggttctatgcagaatacacacacagcagttgctggcaataatattggtgagagttctgtactgggctatgtgatcttagacagtttgcttatgttctctgacctgccgtaggcacattcttaaaatgaagctgttcagaccccctcgattcatcctgctgtggcttctttttcccacctaaatcttaaatacccttttagctgctagtaagtgaatgatgtttttttatgaactttctgaagtcagattagatgaagttgagaaaagcctgatattcttataaagttatatatgtgcatcatagaaaacttagaaaatacagataaacaaaaatcatccatggacgaaccttgaagacattgtgttaactgaaataaaccggacaccaaaggacacatgttatatgcttccacttatatgagatacctagaatagttacatttggttactctgggtacattgcctatagataagccttgctccacaaggagcagttaaaaaaaaaaaaaagataaattcataggatggaaggtagaatagtggttactagggacttggggagggggaaatggggagttactgtttgatgagtgcagatttcagtttgggatgatgaaaaagttctggagatagatagtggcaatggtaacacaacagtgtgaaaataatgccactgaactgtacacttaaaatgattaaaatgataagttaattgtaatttgtgttatccagaaatggttagcaatttattggtgtatattcttttagtattcctgtgtgtgcacaggggtgcttgtatatactttatctttaaaatatatccaggaagctaggcacagtggcttacacctgtaatcccagcactttgggagggtgaggcaggaagattgcctgagccccggaggtcaaggctgcagtgagttgtgatcacgctactgcactctgttctgggcaacccctgtctgggaaaaaaaaaaaaattagtgaggcttagtggtgcacacctgtagtctcagctacttgagtggctggggtaggattgcttgatcccagcaagttgaggccgtggtgagccatgatggtgccactgcactccatcctgggtgatatggtgagaccctgtctcaaaaacaagaaatccagataattctgtgcattataatctagcttttactggatcattaaaattcttttttctttttttttttttttttctgagatggagtttcactcttgttgcccaggctggagtgcagtggtgtgaccttggctcaccgcatcctctgcctcccgggttcatgcgattctcctgcctcagcctcccgagtagctgggattacaggcatgtgccaccatgcccagctaactttgtatttttagtagagacagggtttctccatgttgaccaggctggtctcaaactcctggcctcaagtgatccacccacctcggcctcccaaagtgctggggttacaggcgtgagccaccgcactcagcctgggtcgttaaaattcttaagtgacttcatttttaattactatatgggattctatctttccagtgtatcatgatttatttgacctattgctgaatgttggaggtttcagggtaagaggcacagtttgctattatgtacatcactatagtggcatcctgatagctaaatatttgcctacatccctgattatttccttagtctaaattactgggactaggattttggtgtttgatacatgttactaaattgttttttagaaagattaaaccagtttatgctcttccagcccctgtggtatatgatagttcccattttcctgtaccttgccaacactgggtgatatccagttttaaaatctaaatcttgcattgctatgagaactacaattagagaaggcttatcttctactgcccattctctgtacagagcaaatccctctagacctgaagccccttggagttgtcaagaaacctttgagatgactccccactctgtatctgagctgtcaccagtattctccacttcttcaggattgccatggcaactaaattgatgaaaagatttaggaggccttttctctctttgcaattcctatgatcctttttgaatgtgggtttgggactctgtcaatatacccatcatctaattctgtccattgtgttttaaagtttaaggttgcaatttctgattacatctgccttagccatactgtattatatttgacattcaatatacaatgtccttgtttttctgtatttctaatcttattcccagagatgtgtctatttgttcaggattcattttgcaacgtgtttttactaagcatctacccaaaaccgttgaagtcagatttcaggctgtcttacgtctaaagtagcacaggcaggaaaaactattgaagtgggatttttttttccctttttgtactgaaccgagaaaaagtatatagatgatagagaattcctaatttggtatcattgatatctgggtttttgtttgtttttacagaagactgattaactatacttatttattaatttatcttctcattaataaacacttgctgagtgcttactgtctgctaggcattagggagacaaatatgattaagggaagcttcctcctatcaaggtcatgtgttccatttgggtatactaatgcattagcaatgtaaatcaagtagtgagagatcatctgttcccgataggagatggattattggtggggacttctgtgtgtgtgtgtgtgtgtgtgtgtgtgtgtgtgtgtgtatgtatgtgataaaataaatataggaaatgttaattatagattctaagtagtagatatataaacactcattgcaaagttgcttcaagttttctgtatatttgaaaatattcacaacatgtcgacaaaactagcatgataaagccactatttgtgctaagacttcagcttgtatctggattaggcttattatgtagtagtaggaacattagaaatagttttaactcattaaatacacatgttttatgggaaggttttatatatatatttatatgtaatgaatgtgaacaaacaagggtcagatatacactctgcttccctccagaccagttccggctgctctgctgcacatttcaggagtcttattagaattagccacattctgcccacttgcccttacttctcatatttcacaactcctcctggtggggacttaaggagacattcaaactaggccttgaaagatgagaatttttccaagtggaaaaagaggagtggcagcaagtaaggtaaaggtacagagtcatggaattcccaggaaacgtaaagttgtcatgtgttataggaaaacaacttgtgtgaggggtgttgggagaaatgagagataataccagggtataaagggccttttgaatgctatgttgaggaattttatcctaatggcagtaatgactaacaattatatagtgttcaaaaagtataaatcagcagtggtataccactaagggtttttttcttttctttttttttttgagacagagttttgctctgttgcccaggctggagtgccgtggcacgatctcagctcactgcacttccgccacctgggttcaagtgattcttctgcctcagccagtgtttcactgtgatggccaggatggagcactaagggtctttatggaagaaaaagacatgataaacaaggcttttagggaacttctacagtaatgtagctgtattaaaagtagagatcagagcagcatagtagaagtagaaggctagagctaattgaaggagcacttcagaattagaatcaagaagtcttagaaacctattggttttattctccctaatgtatttggccacttacctgctggggaatttgtctaagttataaaaaataattcctttgggaaacccaaaggaaagttatctattaataattaccccactactttttctgatttatgtaatggccacgtagaggttagatgtgatggttgtgacagtagtgactaatacagcctgtgaagcattttggtcagatatctatgtgctttcattccaggttgactgaggcaagactttggctagggtttgatcagtgatgtaactactcacgagtaccacgtggtggcaatggcattgctgcagaccttggcagcaaagcagtgttagagtagcagtagaaacctttgtgaagctaggaatacattttctggtcataaaaacctcctgaaaattgtgaactcagtgtagcaggagaaagaagatggcttgtttttagtaaagggcaaagtcatttttaaggatcagaagaagaaacggagagtgaaacaatgtgttcctgccctactcccccactggactttttggcaaccattgctgttccttctaaaagtgatttttaaacatgtatattttgaagccaggcacagtgactcacgtctgtaatcccagcactttgggaggccgaggcgggcagatcacctgaggtcaggagttcaagaccagcctggccaacatggtgaaaccccgtctctactaaaaatacaaaaattaggccaggtgtggtggctcacgcctgtaatcccagcactttgggaggccgaggcgggaggatcatgtggtcaggagatccagaccatcctggctaacacggtgaaacaccatttctactaaaaatacaaaaaattagctgggcatggtggcgggcgcctgtaatcccagctactcaggaggctgaagcagaagaatggcttgaacctgggaggcggagcttgcagtgaaccaagattgcgccactgcactccagcctgggcaacaaagtgagactccgtctcaaaaaaaaaaaaaaaaattagtcgggcatggtaacaggtgcctgtaatcccagctacttgagaggctgaggcagggagaattgcttgaaccaggtaggcggaggttgcagtgagccaagatcgcaccactgcactccagcctggggcaacagagcaagactgtctcaaaaaaaataaataaataaaataaattcttaagaaggatattttggaaaactccttacatacctaaattctttgtttatcaaatacttggacttagcacactcttctttgaaatggaccaataaacaacaggagcccataagcaaaaagaactcattattttaaaaacagtaactatccttacaggctttctcagggctctttctgttggatccttccctctcacaggtccttgctaatgatctctaggtggacacattctagatgagatgtccctgtctagaatggcagcaccatgagggctatatcctcagtactaggacagcgcctggtgcttaatagatagtaaatagttgtctaattaactgagcaaacagatagattcatgaattagctttttgctttttctgttagaaactaaaggttcaggtcaggcacaatggcgcatgtctctaatcccagcactttgggaggccgaggcgggctgatcacttgaggtcaggagttcaagaccagcctggccaacatagtaaaaccctgtttctacaaaaattaccaaaattagccgggcgtcttggcaagcacctgtaatgccagctacttgagaggctgaggtgggagaatcgcttgaacctgggaggaagaggttgcagtgagccgagatggtgccaacctgggtgacagagggagacttaaaaaaaaaaagaaagaaagaaagaaaagaaactaaaggttcaaagaatcccagaaaaggaagagtcctcacaagccagtaatctaggcaggattactgatagtatttttatatttgttgtatttttataaaatgccatagatagagggcttttttcaacattacatcagtctaaaaatcacacatttttatatgaactaacctaaatgtctgatgaatctcacaacaccaagtctttgaaatgtgcccatataaataaaatgttaacagattcatgctaattttaaatatcgatagtgtttaaatgccttaattattttttcactccctagctttaaaagaaaataaccaacttcaaaaggacatcacaataacatcaagtctatttgggggaatttgaggattttttccctcactaacatcatttggaaataatttcatgggcattaattgcatgaatgtggttagattaaaaggtgttcagctagaacttgtagttccatactaggtgatttcaattcctgtgctaaaattaatttgtatgatatattttcatttaatggaaagcttctcaaagtatttcattttcttggtgccatttatcgtttttgaagcagagggataccatgcaacataacctgataaagctccagcaggaaatggctgaactagaagctgtgttagaacagcatgggagccagccttctaacagctacccttccatcataagtgactcttctgcccttgaggacctgcgaaatccagaacaaagcacatcagaaaaaggtgtgtattgttggccaaacactgatatcttaagcaaaattctttccttcccctttatctccttctgaagagtaaggacctagctccaacattttatgatccttgctcagcacatgggtaattatggagccttggttcttgtccctgctcacaactaatataccagtcagagggacccaaggcagtcattcatgttgtcatctgagtacctacaacaagtagatgctatggggagcccatggaagatacatggtatacaacatagctcttgctctattggaagctaagtggaatgggagaaattggtgacaggcaaccccataatttcagaaagctatgaaaaagtactcagacatattccttataacactggtgtcacatcacaaagacctatttaatgtgcttctgatttatagggagagacatcctatacttcaggaactgcactttgatccacagaaagcctagtgatgtagagctcctgttagttcaaaaggaaaagaaaagaacaacacagaaagcctaattatgcaatagagtcaagtgctttatagcaatgttacagttatcaaaaaaaatccagatggacctctgagaggatgccattggagtaaccaggcagatgcagttgatcagagctgacttcctataagaagtgagcactgagctgaggaataatggcataaatgaaggaaagtgagatggaaatttgagtttttaattggaaagacaatacatcaggcagatttttaaataggggcaaacaaacagacacataggagatgctaggcatggggtccccactaggatgctgcttagaaacatgcaggggtggtgagtactcccaaagtacacttcattcctagctcagtgattcttatctgagtgttaaagttccttcttcagcaccccgttccacagtccaactgggaactttaagacctttcttggagtctttctaggaactcaagtctgctacttatacagaacagtggctttggtccccagttgtgccttgcagtatttttgtgttcaggaagaaacagtagctcttggataaagaagctagctagaaactctgttgctatggcagtgcttcaaaatgtatttccttaaatgctttctttgtaactatcttcatttagttcatctctcagataatgagagatcagagtcccatccccagtataatactcttctttagggtactttcaccatcttcagtctaaacacagactagactttcaattataatgtgtaagatttaaaatgttattattgtgtgactttgaatatctgtgtaaatctactatctcctctttggtatatacgtgtgtttatttttttctggagatctgtaactgaaatgcttaatttctgaattgttttggatatcacaacttaataccaacataagttttgagcctttttctccctaaatctggtgtgagtctaactgaaactcaaatgaactttttaaaaataattttttcttttctttaattttttttttaagtagagacagggacgcactgttaactaggctggtcttgaactcctgatcttgagccatcctccccgacctgagcctcaccttatagagagggtcttgctctgttgcccaagctggagggcagtggcataatcacagctcactgcagcctctcgacctcctcaagcgatcctcctgccttagcctcccaagtagctgggactataggcgtccaccaccatacccagctaatttttttttttattttttgtagagacaaggtctccctatgttgcccaagttggtctcaaactcctggactcaagcagtcctctcacctcagcctcccaaagtgctggggttacaggtgtgagccatggcacctggccagaacttctagtaaaaagaatattgttgccgggtacggtggctcacgcctgtaaccccagcactttgggaggccaaggcaggcgaatcacctgaggtcgggagctcgagaccagcctgaccaacatggagaaaccacatctctactaaaactacaaaaaattagccgggcgtggtggcacatgcctgtaatcccacctacttgggagctacggtgcctggcctagtttattatttcttaatatctgttgtcttccagtgtcttccttaattcttcacaataccctgtacaatgcttagcacacagtgggcagtctgtaagtttattaaatgtttggtgtggcccatacttcctatccacaaagaatgtaacatgttaagacatctagatgagggaatgatttaagaggaactacaataatattctgaaacttggactctggatctctgcatttagactttcctaaaccagccagcaagtagatcatcatgtcacaaggcttaggttgggcttgctgttcagagaatgaattaaggattaaggagaaaaaaaagcagaaaggttttgctctgtttttcaggttctattgagttgttaacttctaacaagttatcttatttgcttcattgcatgaggcccattgtagtaagaagaggaatttatatgctaaatgttctggtgatagaatgacttttctttttttttacagtccaaaggtcttttttttttttttttaacacctattatgccatgaattcatagggaataggttccagctgctcaggctccttcccattggttctcacaaagtgtgcttctctgggtggagcaggctggtgcttcagttgaacccacgtacctttctctttggcttctttctttttctgatcattttccttcacgcgtttcaggaagctgtcttggctcttagagtgtttaatgtgctcaatacgcacattaattctcttggcaagaatcttgcccttaacttgtttacagcgatgccaacagcatgctgggtcacgttgtagacttttccagttttgccatggtaacacttgtggggcattcctttttgaacagtacccgttcccttgatgtctacaatttcacctttcttacagattcgcatatacatggccaaaggaacaactccatgttttctaaaaggcctagagaacatatatcaggtgcctctcctctttccctttgtgttcgtcattttggcaaattactgaaagatggtggttctggccaaaaggaggaatgactttttaatagctgtgtttgtatctgagccttccctctgcctttcattttttttgttttgttttgttttgtttttgtttgagatgaagtttcacttttgttgcccaggctggagtgcaatggtgtgatttcggctcattacaatgtccgcctcagcctcctgggtagctgggattacaggcacccgccaccacgcccagctaatttttgtatttttagtagagacagggtttcaccatgttggccgggctggtctcaaactcctgacctcaggtgatctgtccacctcggcctctcaaagtgctgggattgtaggcgtgagccacatcacctggccacttttttaactctttccaatggttaattccgtttgatatggttccttggaacttgcacattaccctttatcaattatcaccctgtattgggggtggggaggatgatacctctcttcatagttagatcctacttactttcaacagagttcttaacaatcctagaaactcacaggtccagaaaagacaagcataaaggaaactataaataatgcatttgaagactaactcaggaaatcaatgattatttccccccaggctacccagtgtcttaaaaaaacagtttaattaatacaatcttttgtttcaattttctacctatatttatggcttttagcttttctaataaaagctcaaaatgaattacagtcatcagtgactttttaatgaatagaagacttttgcaatttttaactatttgtttttacttattaaatatttccgccttggccaggcatggtggctcacgcctataatcccagcactgtgagatgccaaggcaggaggatcacttgagtttaagagttctagaccaggctgggtatggtggctcatgcctataatcccagcactttgtgaggccaaggttggcggatcacctgaggtcaggagtttaagaccagcctggccaacatggtaaaaccccatctctacaaaaaatacaaaaattagccaaggggtggtggtgggcacctataatcccatcttcttgggaggctaaggcaggagaatcgcttgaacctggaggcagaggttgcagtgagccgagatcatgccactgtattccagcctgggtaacagagcaagactctgtctcaaaaaaaaaaaaaagtttgaaaccagcctggtcaacacagcaagacacccatctcgttgaaaaataacggtcgggcgcagtggctcacgcctgtaatcccatcactttgggaggccgaggcaggcagatcacctgaggtcgggagttcgagaccagcgtgaccaacatggagaaaccccatctctactaaaaatacaaaattagttgggcgaggtggtgcatacctgtaatcccaactacttgggaggctgaggcaggagaacagcttgaacctgggaggcagagaggttgtggtgagccaagatcatgccattgcactgcagcctgggcaacaagagcaaactccatctcaaaaaaaataaataaataaaaataaataaataagtacttctgcctttaagccacttcctagaaggcagtggcacaaagtgatacatttggaggagtaaatatattacaaaatgaattaggctgggcgcagtggctcatgtctgtaatccccgcactttgggaggccaaggcgggtggatcacttgaggtcaggagttcgagactagcctgatcaacagggtaaaatcccatctctactaaaaataccaaaaaaactagctgggcgtggtggcaggcacctgtaatgtcagctactaggaaggctgaggcaggagaatcgcttgaacccaggaggtggaggttgcagtgagccaagattgcaccattgcacttcagcttgggcaacagagtgagactccgtctcaaaaaaaaaaaaagaactaacatgccagaactttgccttcagtatgttttgtgatttttcccttcttgtgccatttcatcattagttccatgtattatttaagatttcttatcaaccagcaccttgggatttttttgtgtatgtgttggtttagggggtttatttgtttttttcttttttttcggtaattgaaaatgtgaagcaaaatgtcacctgttttttctttcatgtctgacactcatgtcttgtttacccccgacatgcagaagctgaaatccccatttcatacagtcttcaatgtggaggcagtagggatggagaaaataatgtactttgtgctctccggtactctttctttcctattgtctgaggggatttgggcataatttattttgctgcagagataaaaatttgttatatatattttttatcattcagggccaaggaatatagattttttttttcagccttgtctcagctgggtgtctttatttactctgtcttaaagtgttccttttattatcattattattttttaatcattgaattccatttggtgctagcatctgtctgttgcattgcttgtgtttataaaattctgcctgatatacttgtttaaaaaccaatttgtgtatcatagattgatgcttttgaaaaaaatcagtattctaacctgaattatcactatcagaacaaagcagtaaagtagatttgttttctcattccatttaaagcagtattaacttcacagaaaagtagtgaataccctataagccagaatccagaaggcctttctgctgacaagtttgaggtgtctgcagatagttctaccagtaaaaataaagaaccaggagtggaaaggtaagaaacatcaatgtaaagatgctgtggtatctgacatctttatttatattgaactctgattgttaatttttttcaccatactttctccagttttttgcatacaggcatttatacacttttattgctctaggatacttcttttgtttaatcctatataggttttttgaacctataacataagctacaacatgagaaatgtgcggttagatagatatgtcccttctgaaggtcagaaaaaaatataatggaggtaaaacctgaacaagcttggaaactgatggtagacttcttcaaggcagcccttgccctaattaaaattcttgtctttctagaaaaagtctagctgttgatttaccacagaaaataataataataattactattattattattttttgagacagggtcgccctgtgtcacctagattgcagtggtgcagtcatggctcactgcatcctccgtttttcaggctcaagcaatcctcccaccttagcctcctgagtagctgggtccacaagcatgcgccacccacacccactaagtttttgtatttttggtagagatggagttttaccttgttgcccaggctggtctcaaattcctggactcaagtagtccgcccgccttgccctcccaaagccagaaaacatttagaatatctttcagagatgtgtatttacaccactattaacacagggctgtatagcagtccagtactggactatgtagtccagtactattcttttccttactggagggccaggcgtggtggcaggtgcctgtaatcccagctactcaggaggctgaggcaggagaattgcttgaacctgggaggcagaggttgcagtgagctgggaccgtgccattgcactccagcctgggcgacagagcaagactccgtctcaaaacaaaaaaaaaaagagagagagagcagtaattcaggtctcacccatcttcaatccagggggcctagccttagtatttgacccatagtaagcacccaataattgtttaaattaattaacctctgaggccctttaaatctgttgataagtatcttattttgcaaagtcctaagcacttggaagagcagaggaactatttactgggtgtgtatgcttttctaacaatattttatagctggcttttgtttttagaatgaatttgaacattgaaaaggcaggcaatagggatgattctgtgaattctgctaaaactgagtagaaagaatgagtgtagagatgtcgacattgatcaactttctatcttcataagagatctgattctaacatatccatttagactcaagtagaatattgtgtatagagtgagtggcagtgagtaatttggtaaaaatttgctgacctgcttttattctttcctcctttctttcttcctttccttccttccttccttccgtcctttcctttcctttccctcccttccttccttctttccttctttctttcctttctttcctttcttcctttctttccttcctcccttccttttcttttctttctttcctttccttttctttcctttctttcctttcctttctttcttgacagagtcttgctctgtcactcaggctggagtgcagtggcgtgatctcggctcactgcaacctctgtctcccaggttcaagcaattttcctgcctcagcctcccgagtagctgagattacaggcgccagccaccacacccagctactgacctgcttttaaacagctgggagatatggtgcctcagaccaacccaaccccatgttatatgtcaaccctgacatattggcaggcaacatgaatccagacttctaggctgtcttgcgggctcttttttgccagtcatttctgatctctctgacatgagctgtttcatttatgctttggctgcccagcaagtatgatttgtcctttcacaattggtggcgatggttttctccttccatttatctttctaggtcatccccttctaaatgcccatcattagatgataggtggtacatgcacagttgctctgggagtcttcagaatagaaactacccatctcaagaggagctcattaaggttgttgatgtggaggagcaacagctggaagagtctgggccacacgatttgacggaaacatcttacttgccaaggcaagatctaggtaatatttcatctgctgtattggaacaaacactttgattttactctgaatcctacataaagatattctggttaaccaacttttagatgtactagtctatcatggacacttttgttatacttaattaagcccactttagaaaaatagctcaagtgttaatcaaggtttacttgaaaattattgaaactgttaatccatctatattttaattaatggtttaactaatgattttgaggatgagggagtcttggtgtactctaaatgtattatttcaggccaggcatagtggctcacgcctgtaatcccagtactccaggaggccgaggcaggtggatcagctgaggtcaggagttcaagacctgtctggccaacatggtgaaaccctgtctctactaaaaatacaaaaaaattaactgggtgtgctagtgcatgcccgtaatcctagctactctggaggctgaggcagcagaatcacttgaacccgggaggcggaggttgcggtgagccaagatcacaccactgcactccagtctgggtgacagagcaagactccatctcaaaaaatatatatatatatatatacacacatatattttatttcaactgttagacaagagtccaaaggccaaagaataaagttttaggccagtcctttattagaaaatgagtcaaatcccaaagcaagttttttttatgagttaatgaatataaatgactacatattttatgccttaaaaatcacttttaatgaatggtgttttatggcttgtaaatcagagttttaatcagtaaagaaagtttttaatcctcaaaaacacgttatcataaaagacactgtttggcatcaaatgtggtatttggccatgttcattagggtcattttaggaatctcatacattctacttagctatgcttaattcctgataccatggcattttctgaaatgtttcaaggatgacatctctgctgtttttaatttggtaatgatatctgctgatttattaagtgaaaaaagtaatggtgtcattaccttggatgaagaaacaaaaataaagcatttgccacatttttcaacttttttttcctttcttacaaaattgctataagctcattgcccccaaattggacaatatagggaataaaaaagataatttggggtggggttagacacgggtcttgttatgttgccgaggctggtctctaactcctggcctcatgcaatcttcctaccttggcctcccaaagtgctgggattataggtgtgagccacttcaccaagctgagatgccacctcttaaaagataaaataaggacagattacagccactgctcatgcctgtaatctcagtactttgggaggccaaggtgggagaattgctcgaggccaagagttcaagaccagcctgggcaatgtagcgagacctgatctctataaaaagtaaaaaaaaaaaaaaactagctggggccaggcgtggtgggtggcttacgcctgtaatcccagcactttgggaggccgaggcgggcagatcacctgagggcaggagttcaggaccaacctgaccaatatggagaaaccctgtctctactaaaaatacaaaattagccaggcttggtggcttatgcctgtagtcccagctactcgggaggctgaggcaggagaatcgcttgaacctgggaggcagaggtttcagtgagctgagatcgcgccattgcactctagcctgggcaacaagaatgaaactccatctcaaaaaaaaaaaaaatcagctggaaggtggcaaacacctgtggtcccagctactcaggaggctgagacaggaagatcacttgagtccaggaggtcaaggctgcaggtgagccatgtttgtgccactgcactgcagcctggatgacagaccgagacccttctcaaaaaaaaaaatattacccgtactcttttttgagacggagtttcactcttgttgcccaggctggagtgcaatggcgcaatctcggctcagcgcaacctccgcctcctgggttcgagcgattctcctgcttcagcctccccagtagctgggattacaggcatgcaccaccacgcccggctaattttttgtatttttagtagagacagggtttctccatgttggtcagactggtctcgacctcttgacctcaggtgatccgcccaccttggcctcccaaagtgctgggattacaggcctgagccaccgcacccggcctgtactcttattctttaataataaaatatttctgtgtttctttagtcattttacataaacttttatttatttatttatttttatttatttatttttttgagacggagtctcgctctgttgcccaggctggaatgcaatggctcaatctcagctcactgcaagctctgcctcccgggtacacgccattcccctgcctcagcctccctagtagccgggactacaggcgcccgccaccacgcccagctaatttttttttttgtattttcagtagagacagggtttcactgtgttagccaggatggtcttgatctcctgacctcgtgatccacccgtctcggcctcccaaagtgctgggattacaggtgtgagccaccgtgctcggcccataaacttttatttttaaaataatgtcatgataaataatattgcttaggtgtctttaatatattagtaacatttctgttttattgtacatcaacatttatattcaaattaatgggtgaagagtactccattggactaggtatatcgtaatttaatctcctattattggacaactacattgtttctaaaattatactattcctatgactaaacctttgcatatatcttttatctccctaggatatatttctaaaactagcattgttgactgaaagtgtaaatacgtgttaaggtgtttgctacataatgccatatttcctttttaggaaactaagctactttggatttccaccaacactgtattcatgtacccatttttctcttaacctaactttattggtctttttaattcttaacagagaccagaactttgtaattcaacattcatcgttgtgtaaattaaacttctcccattcctttcagagggaaccccttacctggaatctggaatcagcctcttctctgatgaccctgaatctgatccttctgaagacagagccccagagtcagctcgtgttggcaacataccatcttcaacctctgcattgaaagttccccaattgaaagttgcagaatctgcccagagtccagctgctgctcatactactgatactgctgggtataatgcaatggaagaaagtgtgagcagggagaagccagaattgacagcttcaacagaaagggtcaacaaaagaatgtccatggtggtgtctggcctgaccccagaagaatttgtgagtgtatccatatgtatctccctaatgactaagacttaacaacattctggaaagagttttatgtaggtattgtcaattaataacctagaggaagaaatctagaaaacaatcacagttctgtgtaatttaatttcgattactaatttctgaaaatttagatctagataaagctatagtgtggattattttatgtatatttacttgagaaaataattattaaatattagtggaaaagctatactttgggtatgatataggactttcgaattggaattttcctttctatctgtaaaagcaagtaggtatagttttattccccagaaggcatctttttctcccccttgtctcacatgggtgaatttaccagcatatttaactaaattcagactggttccaaatgtactgccagatagtagcatttctctagtgtttgttttcatcctggcttgtaagaatgccctgccacttctgccctgcaatatcccttgctattaggattttggcatcaccttgggtccttaatgccagaaatgggaattgcttcatactgtggaaaaatacccattaaaatattaagaccagtaaaacctcgtttctgcttgggctatttgtggatttcagacatcctgagaagtttaccacccctgtaattaattgtcattgtcatcacttcataataaaaataattgcatggccgggcatggtggctcaagcctgtaatcccagcactttgggaggctgaggtggtcagatcacctaaggtcaggagatcaagaccagcctgaccaacatgaagaaaccccatctttactaaaaatacacaattagccgggcgtggtggcgcatgcctataatcccagctactcaggaggctgaggcaggagaattgcttgaacccgggaggcggaggttgcggtgagccgagattgcaccattgcactccagcctgggcaacaagagcgaaactctgtctcaataataagaagaagaattgcgtgaatatttctttaaaactatgatgagataacataccagattatcaaatggattcagtagtgggtgtgccatttattgcacactgagagatgaccaagtcattctgaaatatctttattaatatatccttcctaggatttttcatcctaacttctccataggtagttacttagcataacatctctgtggccagatgtatcccactactaaaagggcaaagtaagctgtggctgccctggtagatacaatgagtaagtgcacagtgatggctataaatgttttcatctcataatcccatgtccagaccagcaatttgctctgaaagctcttacctgtgtctgtttcaatggctcttgatcacttgcctgcacgtccagaattccttatttattcattgaaaattagcgttctttatccctttgttttgcaagttcagctttttagagatggctaaaatggtctaatctttcttggcaaaggcaattctgagctgcagattagactacaagtggcttgggtacatgttgtctttaaacaagcgaagaggaaaactttgagctctattcagacttggtgaagtgtggtaaatttatgatgaaagctactgactgtattacacatgattaattctgaagcccatattaagatgatcttttcagcagttcagcattgctcttctaactgaacagtttcaaggctgggatttcagcaattaatcagttcagaattgctaatgatcctggcggagggtggtagcaaaagggggaggatgtcattagcttctctagcctgccttttttcagtgccctgtggcagtatggagtgaggcaacatgaaagaaagatggcctgaccttcatggcagtattgtgcaacacgtaaatactggtgtgagtggctgtggctatggctagtaaatgatggcccttggtaaacaaagttatttatcagacaatacctaccagctaggtcaactgtgcccataattgatctggttaatttcttttgctgcctattgatttttatttggttgatagataatagctagaggactctaaatttctttggggaagaacatgaaccccttctaagccttcttacgagagaattgatcgcttttgcactgacctttagtaacatcctgatttcagtgttttgtaactatcagagggttgagtcttggttttaagccatgtatatctgtagcataactttctgtgtaggctagttacctctcagcttataaagtgtaggctgataaatttatagtacagtagagtgtcactatgcaaagaaacgatcttagggaatcgaatgatatctgctattaaagcaaaattaatatatattttttctttttacttttttttttttttaaagacatgaaatctcactgtattgcccaggctggtcttggtctcagactcttgagctcaagcagtcctcccacctcagcttcccaaagtgctgggattataggcatgagctgccgtgtctggcccagtatatattttttaagttttaagttttgtggtacgtagtaggtttataatattattttgaatccttagttgtaattttatgtctgctgatgtgtacataatttttattaaactatttatttgagacttcaggtatcttttttttttttttgagacggagtctcgcactctcgcccaggctagagtgcagtggcgccatctcggcttactgcaagctctgcttcctgggttcacgccattctcctgcctcagcctcctgagtagctgagactacaggtgcccgccaccacgcctggctaattttttgtatttttagtagagacagggtttcaccgtgttagccaggatggtctcgatctcctgaccttgtgatctgcccgcctcagcctcccaaagtgctgagattacaggcgtgagccaccgcgcccagccgagacttcaggtgtcttagaattttttaaatgtaccctttctgagaaaaacagagacttaaagctaggataactggtattctattttttttttttttttttttttacctccagcctgggtgacagagcaagactctgtctaaaaaaaaaaaaaaaaaaattcactttaaatagttccaggacacgtgtagaacgtgcaggattgctacataggtaaacatatgccatggtggaataactagtattctgagctgtgtgctagaggtaactcatgataatggaatatttgatttaatttcagatgctcgtgtacaagtttgccagaaaacaccacatcactttaactaatctaattactgaagagactactcatgttgttatgaaaacaggtataccaagaacctttacagaataccttgcatctgctgcataaaaccacatgaggcgaggcacggtggcgcatgcctgtaatcgcagcactttgggaggccgaggcgggcagatcacgagattaggagatcgagaccatcctggccagcatggtgaaaccccgtctctactaaaaaataaaaaaattagctgggtgtggtcgcgtgcgcctgtagtcccagctactcgtgaggctgaggcaggagaatcacttgaaccggggagatggaggttgcagtgagccgagatcatgccactgcattccagcctggcgacagagcaaggctccgtctcaaaaaaaaaaaaaaaaaacgtgaaaaaataagaatatttgttgagcatagcatggatgatagtcttctaatagtcaatcaattactttatgaaagacaaataatagttttgctgcttccttacctccttttgttttgggttaagatttggagtgtgggccaggcacggtggctcacacctgtaatctcagcactttgggaggccgaggcgggtggatcacctgaggtcaggagttcgagaccagcctggccaacgtgttgaaaccccgtctctactaaaaatataaaaattaggtgggcgtggtggcaggcacctgtaatcccagctactcaggaggctgaggcagcagaatcgcttgaacccaggaggtggaggttgcagtgacccaagatcgcaccattgcactccagcctggggacaagagcgagattcttgtctcaaaaaaaaaaaaaaaaaaaaaaggtttggagggtggtgagctgagatagtcaactattaactcctatctacctgctgggactacactggtgaggtggagcctaagtcctaaaacaacaagtgaggcagctggacgcggtggctcgcatcagtaatcccagcactttgggagcctgaggcgggcagatcacaaggtcaggagttcgagaccagcctggccaatatggtaaaacccagtctctactaaaaatacataaattggctgggcgtggtggtgtgcacctgtaatcccagctacttgggaggctgacacagaagaattgcttgaactctggaggctgaggttgcagtcagctgagatcctgccactgcactccagcctggcgacagagtgagactctgtctcaacaacaacaaaagaaagaacaagtgaggcaaaacctggagaccccagcttcatgtaacacctagtttgagtattgttgagagtttttcaggaaaaaagtctgataacagctccgagatagtcttaacatatgaaaaagcaaaaaagggaggagacagatcatttgtcctatacctttctcttttaaggttttaattataacttgtgtaatacaggagacctctgggtgtttttagttgactataaactaaatctgagtacacatttcagggctgctaaaaatgcttatttgaaactgggccgtattaacacaagcagaggctctggagcaagtgaagtacagatccagagccccactgtattctccaatggagtgattgcctgaaagatgatgtcagttttaagcaccgtgcttggtttttaacatggtcactgacaaattggagagtgtttatccagaggtagatggtaaagatacataaaagtaacttgaaatactgtcttttgaagaagaaatgagaagatttaaggaaataagacactgtcttcaagtatctgaagaaccgttacccggaagagaactgttatctggaacaggattaagactcactcatggggctccagaaagcagacgagtgcatggaggacgcagaagatgcagattgtgtggctcaactctaaaatctttctaacaaaattagttctctggatgtgttccagttcacttgatgatgattcttttgtttttgtttttgtttttgaggtgtagtttttcactcttgttgcccaggctgctggagtgcaatggcacgatcttggcttgctgcaacctccccctcccgggttcaagcgattctcctgcctcagcctcccgagtagctgggattacaggaatgcaccaccatacctaattttgtatttttagtagagacagggtttttccatgtcagtcaggctggtcttggactcccgacctcaggtgatccacctacctcggcctcccaaagtgctgggattacaggtgtgagccatcgcgcctagcctatgatgattcttttcacagagatacaggcacttaaggagaggatctaaaccccttggacacattgccgttgaacttctaagatcttaggtttccacttactcatgaaaattataccacagggtcagagggtagtgttcattggagccaggtgccagaacaagttattacaaactactattttagagaaaaatgtcattaaagtttaagataccttaagctataggtttgcatcaaagttaatgaaaggtaaaaagatgccaagcgtggtggctcaggcctgtaatcccagcgctttggggggccaaggcgggcagatcacgaggtcaggagatcgagaccatcctggctaacacggtgaaaccccatctctagtaaaaatacaaaaaattagccgggcatggtggcgggcatctgtagtcccagctactcaggaggctgaggcaggagaatggcatgaacccaggaggcagagcttgccgtgagctgagatccagccactgcactccagcctggctgacagagcaagactgcatctcaaaaaaaaaaaaaaaaaaaaatgcaaatcaaatctaaagtagttcagtctttaaactcaaagccaatacatttgctttgaactacaaatgaactgaagtttttaagtgtaataaatgttactaaatcggcttttgtagcagttaaacaaaaaacttcaaaaattgtaaggattctgtgagggagcatggctgctgctgctgctgctgcttgcagatagcctgctgtgtttaggatttagttaaatacatttctcctgtttaaaactaaatggtctttccttagtttgcttagttcttcagaagggcctttgaaacactgggaaataaacaagtgattctttagctactgctttctgaaatacttatataaaagctctgcactgtattctcccatccctctcaggggaatattagagggttaggactccccaggtagacattctaggggtgaaaatttgtcattacattgacatttcagatttaggttttcaacaatactgttttcttctttcacatattgccatctagtaatatagatgttctccgtccacattaatcaaaactattgacatggataattcctaattccttgaacactataatggagatctatagctagccttggcgtctagaagatgggtgttgagaagagggagtggacagatatttcctctggtcttaacttcatatcagcctcccctagacttccaaatatccatacctgctggttataattagtggtgttttcagcctctgattctgtcaccaggggttttagaatcataaatccagattgatcttgggagtgtaaaaaactgaggctctttagcttcttaggacagcacttcctgattttgttttcaacttctaatcctttgagtgtttttcattctgcagatgctgagtttgtgtgtgaacggacactgaaatattttctaggaattgcgggaggaaaatgggtagttagctatttctgtaagtataatactatttctcccctcctccctttaacacctcagaattgcatttttacacctaacgtttaacacctaaggtttttgctgatgctgagtctgagttaccaaaaggtctttaattgtaatactaaactacttttatctttaatatcactttgttcagataagctggtgatgctgggaaaatgggtctcttttataactaataggacctaatctgctcctagcaatgttagcatatgagctagggatttatttaatagtcggcaggaatccatgtgcagcaggcaaacttataatgtttaaattaaacatcaactctgtctccagaaggaaactgctgctacaagccttattaaagggctgtggctttagagggaaggacctctcctctgtcattcttcctgtgctcttttgtgaatcgctgacctctctatctccgtgaaaagagcacgttcttctgctgtatgtaacctgtcttttctatgatctctttaggggtgacccagtctattaaagaaagaaaaatgctgaatgaggtaagtacttgatgttacaaactaaccagagatattcattcagtcatatagttaaaaatgtatttgcttccttccatcaatgcaccactttccttaacaatgcacaaattttccatgataatgaggatcatcaagaattatgcaggcctgcactgtggctcatacctataatcccagcgctttgggaggctgaggcgcttggatcacctgatgtcgggagttcaagaccagcctgaccaacatggagaaaccccgtttctactaaaaatacaaaattagccgggcttggtggcacttgcctgtaattccagctactcgggaggctgaggcaggagaatcacttgaacctgggaggcgggggttgcagtgagctgagatcgcatcattgcactctaacctgggcaacaagagcaaaactccatcaaaagaaaaaaaaaatcgggtgcagtggctcatgcctgtaatcctaacactgtgggaggccaagacaggcagattgcctgagctcaggagttcgagatcagcctgggcaacatggtgaaaccctgtctctactaaaatacaaaaaattactcagcgtggtggcatgcgcctttagttccagctactcaggaggctgaggcaggagaatctcttgaacccgggaggtggaggttgcaatgagccaagatcgtgccactgcactccaacctggcaacagagcgagactccgtcttaaaaaaaaaaaaaattttgcagcgcaaaccaggatatcctctgttctcatttgttctagatttcaaaagaaacagtcctttctttggggaaaagagaaaggaaaaggagttttataaaaggaaagaaaagattcataagaacaagaagtgggcccacttgcatatacctttgtagaaaactgttcactgttgttgaagaaaagctcttcatattaatatgcagtccagatgcagtggctcacacttataatctcagccctttgggaggctgagacaggaagattacttgaggccaggagtttgaaaccagcctgggcaacatagtgagactctgtctccacaaaatttttttttaattagccgggcatggcagtgtgcttctgtagtcttagctactgaggaagctaagccagaagaatcacttgagcccaggagttcaaggctgcagtgagctatgatcataccattgcactcttgcacttgcacagagcaagaccctgtctcttaaaaaaaaaaaagtgtgtgtgtgcatatgcatatatacatatatatacatgcaaatgtatctgtttataattcagattgcttcaaaaagatgttgcactttatgatactgagaacagtgagaagtaaataagatagagtgtaggaggaggaataatttcagaacagccatctgagaacttctgtgacaacagatcaggcaaaatgaaatgtgaaagtaattttataggccaggcgtggtggctcatgcctataatcccagcactttgagtggccaaggcaggtggatcacttgaggtcaggagttcgagaccagcctggtcaacatggtgaaaccttgtctctactaaaaacacaaaaaaattagtcgagcgtggtggcatgtgcctgtaatcctagctgctggggaggctgaggcaggagaatcacttgaacccgggaggcggaggttgcagtgagcctagattgcaccactgcactccagcctgtgagacagaatgagaccctgtcttaaaaaaaaaaaaaaagtaattttataaactattgtgcacaattcgatgtattcataattaattaaatgattatttttgttggttttaacttttattcagtggctatttattgggagcctactgtgttctgggcactaggaatgcaacagtaaataagactaactaagtccctggtaggattcaggttctgtcgaggggagatacacaataaagatgaatttaagataacaataaatgctatggagaaatatacagaacagtggaatagtattagctgtcaaaggttgttgattactttcgtttaaggaggccagggaaagcctttctgaaaaaattgagctgagacctaaataacaagaaataattgtccttgaaaaatgaagggaatgcatcttataggcagaggaatagcaaacataaaggtcttgaggtaataatgagtgtggttttttgatttctgtattttggtttttttgagatggtgtctccctctatcccccaggctggagtgcagtggcacaatcttggctcactgcaaactctgtctcctgggttcaagcaattctcctgccttggcctcctgagtagctggtattacaggcacgcgtgctaccacacccgactagtttttatttttagtagagatggggttttaccacgttggtcaggctggtctcaaactcctgaactcaagtgatccaaccacctcaacctcccaaagtgctgggatcacaggtgtgagccactgtgcccggccagagcttggtttattttttaaaagataggccaatgttggtcgtgtgtggtggctcgtgcctataatcccagcactttgggaagccaaggcaggcaaatcacttgaggtcaggagttcgagaccagcctggccaacatggtgaaaccccatctctactaaaaatacaaaaaactagcatggtgtggtggtgtgtgcctgtaatcccagtgcctgtaatcccagctactccagaggctgaggcaggagaatcacttgaaccgaaaggtaggagttacagtgagccaagatcgcatcactgcactccagcctgaacgacagagcaagactcctgtctcaagaaataataatgataaaaggttcgggcacagtggctcacacctgtaattccagcactctaggaggccgaggcaggcagatcccctgaggtcaggagtttgagaccagcctggccaacgtggcaaaaccccatctctactaaaaaatgcaaaaattagctgggcacggctgggtgtggtggctcattcctgtaatcccagcactttgggaggtcaaggcggacagatcactgaggtagaaaccctgtctctactaaaaatacaaaaatttgcccagcgtggtggcgcgtgcctctaatcccagctacacgggaggctgagacaagagaatcacttcatcaacccgggaggtggaggttgtggtgagctgagatcgcaccattgcactccagcctgggcaacaagagtgaaactccatctcaaaaacaaaaaaaaattagctgggaatggtggcatgtgcctgtaatcacagctacttgggaggctggggcaggagaatcgcttgaacccaggaggcggagattgcagtgagctgagattgcgccactgcactccaggctgggcgaaagagcaagactccgtctcaaaaataataataataataataataggccagtgtagctggagtaatttgcaaattatgtgtggaggcagagattacacaaggaatgggagaaggtcatagatgagggccagatcacatagtatttggtggtaaggaattcagattttatccttgtggtaattggtggtgtggagatggttaaaaacaaggttggtttgggatgggtttgaagagaggacttgctaatggattaaatttggaggataaggtaaagagaaattgaaggagtgacacttgggttttggcttgaacaatagatcttgttagtaatattaaattagatgaagaaggcatggtagggaatatgggggagtgggaaaggcaggaagcaggaatggaaccaggaactctgttttagatgtgagaatttgttgttgttgttgttgttgttgttgttgttgttgttgttgttgtgacagcatctcgttctgttgcccaggctagagtgcatggagtgcggtagcacgatctcagctcactccaacctccgcctcccggttcaagtgattttcctgcctcagcctcccgagtagctgggattacaggcacctgccacaatgcctggctaatacttgtatttttagtagagatggggttttaccatgttggccaggctggtcttaaactcctgacctcaggtaatccacccacctcggcctcccaaagtgctgggattgcaggtgtgagccactgtgcccggccagatgcatgaattttgagatgtatactagacttctggatagagaagttaagtaggcagttggacacattgtatgaagctcaggggtacaaggaggactatgaacatgggagtcttctgacaaatttatcactagactcctcattcaagtaactaggaaatgtcagatattcttcccctagtaatagccagtggttatactcttgcctttagttttcttcacaatactcttggcaacacataaggccttccctacaatctgagtttcagtcagaattgtttctgagcgttcttcctcaaatttctccccagtctcattattctttattctcatgtccatgaccagtcataatagtaattatgaaaaacctctaactttctttagtgcattgaatgtatattttatcattttggttgtgttaactgtaaatctctcagtggaaatctgaaaagcctttatttccttagatgataatatacaattgatttaggagatagggaatttttcagttacctttataacagcacagtattagcagtctaatctaaatgctaagtgaatgttttgagaggagatagatgttgaaaattaaaatacattaagtcccagtgaggtgaaaagccgattgttaagttctgcacacaaaagatttgcttcagtgaattgatttcaacagctgagatcctagtcatttcacctggtctaccaaaaagaatgattttacttgcttttggtcaaatctctgcccagcaattctttttctttctttcttttttttgttttatgtgtgtgtgtgtgtgtgtttttttttagcagagtctcactttgtcacccaggcgggagtgtggtggtatgatcacagttcactgcagcctccaactcctgggctcaagtgatcctccagcttcagcttttcaagaaattgggactgcaggcacatgcaactatgcctggctgaggttttatgtatcttttttctagagaaggggtctcactgtgttgcccagctgggtctccagctcctggtctcaagctgtcctcctgcctcagcctcccaaagtgccaaagtgctagggttataggtgtgagccattggtgcccagctactgcctgcctggcaattctgaatgccttaaattttttttttttttttttttttttttgagacagagtttcactctgtcacccaggctggagtgcagtggcatgatcgtggctcacagcaacctctgcctcctggattccagcaattctcatgcctcagcttcccgagtagctgggactacaggtgcatgccaccacgcccagctaatttttggtttttttgtttgtttgtttgtttgttttgagacggagtctcgctcagttgcccaggctggagtgcagtggcgtgatctccgctcactgcaagctccgcctcccgggttcacgccattctcctgcctcagcctcccgagtagctgggactacaggcgcctgccactacacccggctaatttttttgtattttaagtagagacggggtttcaccgtgttagccaggatggtctcgatctcctgacctcgtgatccgcctgtctcggcctcccaaagtcctgggattacaggcgtgagccaccacacccggcctaatttttttttttttaattttatttttaattttttgagatgcgagatggagtctcgctctgttacccaggctggagtgcagtggcaccatctcagctcactgcaacctccacctcctgcattcaaaagattctcctgcctcagcctcccaagtagctgggattacaggtgcctgccaccacgcccaactaattttttgtatttttagtagagatgaggtttcaccatgttggtcagactggtgtcgaactcctgacctcaagtgatctgcctgcctcagtctcccaaagtgctaggattacaggggtgagccactgcgcctggcctgaatgccttaaatatgacgtgtctgctccacttccattgaaggaagcttctctttctcttatcctgatgggttgtgtttggtttctttcagcatgattttgaagtcagaggagatgtggtcaatggaagaaaccaccaaggtccaaagcgagcaagagaatcccaggacagaaaggtaaagctccctccctcaagttgacaaaaatctcaccccaccactctgtattccactcccctttgcagagatgggccgcttcattttgtaagacttattacatacatacacagtgctagatactttcacacaggttcttttttcactcttccatcccaaccacataaataagtattgtctctactttatgaatgataaaactaagagatttagagaggctgtgtaatttggattcccgtctcgggttcagatcttagctgataagtggaagagctgggactttaagcagatgagaatctaaagactttgctcttttcacttcactggggtgtctttctctctctctctcttgctctctctctctctttttttttttcccaagacggagtctcactccattgcccaggccagagtgcagtggtgcgatctcagctcactgaaaactcatcttgcccaggctggtcttgaacccctgaccttgtgatcctcccgccttggcctccccaagtgctgggataggcgtgagccaccgtgcccagccaataatagctaaaatttatataatgttcactgggccaggcacagcggctcgttcctgttatcccagcactttgggaagctgaggcaggcagatcgcttgagccaaggagttcgataccagcctgggcaacatggcaaaaccccatctctaccaaaaaaaatatacaaaaattagccaggcgtggtggcatgtacttgtagttccagctactcggaaggctgagttgagagtatctcttgagcccaagaagaggggactacagtgaacggagattgcgccactgcactccagcctagacgacagacagaagatctcaaaagaaaaaaaaaaaaaaaagatcactttatgctgggactgctctaaaggcccaaccatgttttaactaattaacaattttatgacaactctatgagctatgtactgtaattatgcctatattacagatgtgaaaattgaggctcagagaggttgaataagttgctcaaagtcacacaggtaataagtgatggaactagaagttgaactcaggaagtctagctccaagtctaaattctttgttaatttatttttcgggccagagtcttactctgtcacccaggctggagtgcagtgccactatctctgctcactgcaaccttcacctcccaagttcaaaccttgttcaattcttgtgccttggcctcccaagtggctaggattacaggcatgtgccacaacaactagctaattttttgtctgattctgttggccagtctggagtgcagtggcgcaatctcagctcactgcagtctccagctcccaggttcaagtgattctcgtgccttagcctcccaaatagctgggattacaggcacgtgccaccacaccgagatagttttttgtatttttaatagaaacaaggtttcaacatgttggccaggctggtctcaaattccagacctcagatcatctgcccgcctcaggctcccaaagtgctgggattacaggcatgagccactgcacccggccttaatttttatatttttattagagatggggttttgccatgttggccaggctggccttgatctcctggcctccagtgatccacccgccttggcttcccaaagtgctgggattacaagcatgagccactgcacccggcctccaattctaaactcttaacaacaatactatagtttcttgaaaagttgttgaaggcttcacggagggaaaaaaaatggagcattctaacaactttgcagatgagacccaagaagactcaatgactttctcctgatcatattgtagcagatgacttagccagaactctgacttcctcacagggagaaagtctgcaagatttcacacttacctgtcaggcctgagctggctgctttctcagctccctaagtgctatgttcccagtctgcttttcttcctttttcaagtgtgcactaccaggcatttcagaacatcccaggctggtcgcggtggctcacacctgtgatcccagcactttgggagcccaaggcgggtggatcacctgaggtcaggagttcgagaccagcctggccaacatggtgaaaccccatctctactaaaaatacaaaagttaactgggcgtggtggtaggcacctgtaatcctagctcaggattactcgggaggctgaggctagagaatcggttgaacccaggaggcggaggttgcagtgagccaagattgcgccactgcactctagcctggggacaagagggagacttcatctcaaaaaaaaaaaaaaaatcccagctgggcacagcggctcacttctgtaatcccagcactttaggaggccaaggcaggaggatcacttgagcccaggagttcaagactagcctgggcaacatagtaagaccctgtctctacaaaaaaatttaaaaattaattgggtgtcgtagcacactcttgtattcccagctactcaggaggctgaggtgagaagaatgcttgagtctgggaggtcgaggctgcagtgagccatgatggtgctactgcactccagcctggccaacattgtgagaccttgtctcaaaacaaaacaaaacatccttctactgagcactttctgtccctttatagaaacttaagagggaaccagtagaggtaatttcctaaggaaaactgctttgggacatgatcacaaatgaagcctggagttttgaactgctgaggtcagcctgtttttaccttctgagcctatcaagtaattgttccagatgccaagaaaagctgctggccttatttctgcttctgcctttaccacaggggagcgccatgtgagccagtcctctgtttttcctccactgtatgctaggcagtattagcaccagattcttcccctctttaaaaagaaattctagtgctttggattttttcctccatgcagaatagcaatgatggaaagtatgtggtcaaagtaatgacattctgaaaatactaaatgtcaccatagtatttttctctggaagagaaatgtatatgtagaggtgaaacttcaaatttctttttttttttttttaagacgaagctttgctcttcttgcccaggctgaagtacaatggcgtgatcttggctcaccgcaatctctgcctccagggttcaagtgattctcctgcctcagcctcctaagtagctaggattacaggcatgtgccaccacgcccagctgattttgtatttttagtagagatggggtttctccatgttggtcacgctggtcttgaactcccgaccccaagtgatccacccacctcggcctcccaaagtgctaggattacaggccaccgcgcccggcctgaaacttcaaatttctttttttttttgagacagagtctcgctatgtcacccaggctggagtgcagtggcgccgtctcggctcactaccagctccactccacctcctgggttcacaccattctcctgcctcagcctcccaagtagctgggactacaggtgcccgccaccatgcccagctaattttttgtatttttagtagagacgggttttcactgtgttagacgggatggtctccatctcttgacctcgtgatccgcctgcctcagcctcccaaagtgctgggattacaggcgtgagccactacgccaagcccgaaacttcaaatttcttatctcataactaggcatcctcatcactgagtgttagcctggatataaacattcctaatcttttgtacttttcatgtcagcatttggctccacttggctgcctggggagaacttctagcattatgagcatgcaggtcctatcaacaggttgggggtgcggtttattcatacaggtagtgagagtggcacagatggatgctgtcccttaaaacaaacagacttgtctttgggagcctgaggcgggtggatcatgaggtcaggagttcaagaccagcctggccaacatagtgaaaccccgtttctactaaaaatacaaaaaattagccgggtgtggtggtgtgcacctgtaatcccagctactagggaggctgaggcaggagaatcacttgaacccaggaggtggaggttgcagtgagccgagatggcaccattgcactccagcccaggcgacagtgcaagactgcgtctcaaaaaaaaaaaaaaaacacacagacttgtcctactgccatttcttttcactctggcggtaaagtaagagagtgtgtgtgtgtgtgtgtgtgtgtgtgtgtgtgtgtgtgtgtgtttctgtccgtctgtctgtcaagggggagggtgaccactttctaaaaggccatccgtgtatttttagcttcctgatttttttctctatcgcagtctctttgaagccaggtgaattttaggccttggcaattttctttttattgcaatgggaaggtcaagacactgagagtcacccaaaacatatccatccaaaatgatacaattttagggtttatttttaagtgatacccaagttatttgctaagaacctatgccagtgtgtttatgagaatttgcactgtcccacactgttgccaccagccacatgggactgtttaaatttaaattttacaaattagccagtcatggtggtgtgcacttgtagtcccagctacttaggaggctgaggcaagaggattgcttgagcccagaagttcaatactgcagcaagctatgatcgtgccactgtactccagcctgagtgacagaatgagacctcatctcttcaaaaaaaaagaaaaaaattaaaatatgaagtttagttcttcattcaccctaaccacatctccagtgctcaataactatatgtgactcatggctaccttattagcatagatatagaacattgtgactatcacagaaagttgttttgaacagtgttgccaagccctgtaagtggaagaggcagtgcagtgtgatctgtgtcttcaggaaaccaggtagtcagactagttcaatgaggagaggcagaacctggcttcacttctagattaaaaactgcttaggtggcctaaagatacaatggccattctcagagtagtgagaaggaaggaacagatgtttagggggctagaagaaagtcagagagggccgggcgcagtggcttatgcctgtaatcccagcactttggaaggccaagacaggcagatcacgaggtcaggagttcgagaccagcctgaccaacatggtgaaaccctgtctctactaaaaatacaaaaattagccgggcgtggtggtgcgcgcctgtaatcccagctactcaggaggctaaggcaggagaatcgcttgaaccctggaggcagaggttgcagtgagcccagatcgcaccactacgctccagcctaggtgacagagagagactccgtctcaaaaaaaaaaaaaaaagtcagaggagacaaggagcatgtacacctaaaatcaacatagacccctctgttgatggggtcatagtgagtacttgaggtaccaagtctggataaacatcaaacttcagccaataactttgagtttctagccatccaagcctcttattaaacatacagaaggaccttttttcccttgcatctaacaagttaaagcacctgcagagatcattagggaggagccttggcctgattggtgacaaaagtgagatgctcagtccttgaatgacaaagaatgcctgtagagtgcaggtcaactacatatgcacttcaagaagatcttctgaaatccagtagtgttctggacattggactgcttgtccctgggaagtagcagcagaaatcatcaggtggtgaacagaagaaaaagaaaagctcttcctttttgaaagtctgttttttgaataaaagccaatattcttttataactagattttccttctctccattcccctgtccctctctcttcctctcttcttccagatcttcagggggctagaaatctgttgctatgggcccttcaccaacatgcccacaggtaagagcctgggagaaccccagagttccagcaccagcctttgtcttacatagtggagtattataagcaagatcccacgatgggggttcctcagattgctgaaatgttctagaggctattctatttctctaccactctccaaacaaaacagcacctaaatgttatcctatggcaaaaaaaaactataccttgtcccccttctcaagagcatgaaggtggttaatagttaggattcagtatgttatgtgttcagatggcgttgagctgctgttagtgccaacatgttagtgagaaaatatctttggataggtaaaaatcaaggaggagttctcctcttcctaaaccatcttaatttacttacatagaagaaagcacagcagctggcccaccacggacgggcccagagcaggggaagattctcggtgaacatttctttttttttttctttttttttgaggtcgagtctctgttgcccaggccagagtgcaatggcgcgatctcggctcactgcaacctccacctcccgggttcaagtgattctcctgcctcagcctcccaaatagctgagactacaggcgtgtgccaccacgcccgactaattttttgtattttttttttagtagagacggggtttcaccgtgttagccaatatggtcccgatctcctgacctcgtgatccacccgcctcagcctcccaaagtgctaggattacaggcatgagccactgtgcccagccctctccatgaacattttctaattaaacttgacacttaatacaatgttatgcttaggactgctataaagcttacctctggagttgcgcagcacaaaggccttggtgtgtgtataaatttggtttgttcttttcacagcaaaagctacccacctttgcctcctgtgcctgcttctgcccagggacttaggtcctcttacaccttagagaaaggccttagcatctggtcacaggcagatgagtgacagcaagaaaacctggctgcaatgtaattttgtttccatcctctttattagttatcaattggatttttatgaaatttccaagttccactcaaggatttctcagtgtttttttactttggtatagtggaaaccagggttgccagaaagtattattttgggggtgagttagtcaaccttcgttcagtcagacagacaggagcacctcagcaattcccagaaacgggctgatgggaaagagcaacatacatgaatgtcttgaagaacacagccaacagagcccattgggcagttctgattttccaggtacacagcatctccacagtctcttctgatttttattcccctgagtatatggattccagctcagcatgtagcctttccctgctgagtctctaaccaggataacatgtatttttttgactggatgaattatcttcccatctcttgacatttacagtaattaccaccaagtatggtattttcagtggccgtgattatcagttaccaacacagaattaggatgaagggaggaagggagggaaggaaggtgggtgttttttcacacagtgtcttagccagcaatttagcaaattaatggaaattagatctttgatttttttttctttcaagcattttatttgagagactatcaaaccttataccaagtggccttatggagactgataaccagagtacatggcatatcagtggcaaattgacttaaaatccatacccctactattttaagaccattgtcctttggagcagagagacagactctcccattgagaggtcttgctataagccttcatccggagagtgtagggtagagggcctgggttaagtatgcagattactgcagtgattttacatctaaatgtccattttagatcaactggaatggatggtacagctgtgtggtgcttctgtggtgaaggagctttcatcattcacccttggcacagtaagtattgggtgccctgtcagagagggaggacacaatattctctcctgtgagcaagactggcacctgtcagtccctatggatgcccctactgtagcctcagaagtcttctctgcccacatacctgtgccaaaagactccatctgtaagggatgggtaaggatttgagaactgcacatattaaatatactgagggaagactttttccctctaactctttttcccatatgtccctccccctcctctctgtgactgccccagcatactgtgtttcaacaaatcatcaagaaatgatgggctggaggctgggcatggtggctcatgtctgtaatcccagcactttgggaggccgaggcaggtggatcacttgtcaggagtttgagaccagcctggccaacatggtgaaaccccatctgtactaaaaaaaaaaaaacaaaaagtagccaggcctggtggagcatgcctgtaatgccagctatttgggaagttgaggtgtgagcatcgcttgaacgtgggaggcagaggttgcagtgagccaagattgcaccactgcactccagactgggtgacagagtgagactttgtctaaaaaaaaaaaaaaagagagagagagaaaagctaggtgcggtggctcacgcctgtaatcccagcactttgggaggctgaggtgggcagatcacgaggtcaagagatcgagaccatcctggccaaccaacatggcgaaaccccgtctctactaaaaatacaaaaattagctgggcgtaggggcgcacgcctgtagtcccagctacttgaggggctggggcaggagaatcgcttgaaccccggaggcggaggttgcagtgagccaagatcgcgccactgcactccagcccgggcgacagagcgagactccgtctcaaaaaaaaagagagagagagaaatgatgggctgggccagtgccccacccctgtaatcacaacactgggaggccaaggtgggagaatcgcttgagcctgggagctgaagaccagcctgggcaatacagtaggacctcatgtctacaaaaaaattattaaaaattagccaaggctgggtgcggtggctcatgcctataatcccgggggtgaagttgagcccaggagtttgagaccagcctgggcaacatggcaaaaccctgtctctaccaaaaatacaaaaaaattagccaggggtggtggtacgtgtctgtagttccagctacttaggaggctgagatggaaggattgcttgagcccaggaggcagaggtggcagtgagctgagatcacaccactgcactccagcctgggtgacagagcaagaccctgtctcaaaaacaaacaaaaaaaatgatgaagtgacagttccagtagtcctactttgacactttgaatgctctttccttcctggggatccagggtgtccacccaattgtggttgtgcagccagatgcctggacagaggacaatggcttccatggtaaggtgcctgcatgtacctgtgctatatggggtccttttgcatgggtttggtttatcactcattacctggtgcttgagtagcacagttcttggcacattttaaatatttgttgaatgaatggctaaaatgtctttttgatgtttttattgttatttgttttatattgtaaaagtaatacatgaactgtttccatggggtgggagtaagatatgaatgttcatcacaaaaacataaatcaaggccgggcatggtggctcatgcctataattccagcactttgggaggtcaagatggaggtcaaggtgggagcctagaagttcgagaccagcctgggcaacataaggagacttcatctgtacaacaaatttaaaaagtagctgggtgtggtggcagatgcctgtagtcgcagctacttgggaagctgaggtgggaggatcacttgagctcaggaggttgatgcttcagtgagccacgatcacaccactgtactccagcctgggcgacagagcgagaccgtgtctcaaaaagaaaaaagaaagtataaatttacacaaaaacaataaaataatcccagtaattccaccacttggagatgatcaccataaaactccaccaggcatatgtgcgtatatatacacgtgtattttataaaatgtgatcataattacactgttttgcttttttccttaagatattacatacatttttccacatcgttaaattacagtgctgttttcctggtggctttcctttaacagattgaagttcatgttaatacagttgccagaggctgtgggctttcactgtcaccaggagtcactcctagggcctcttcagagcaaggccttatgtcctgaagcattgccttttttttttttttttgaggtggagtctcactctgtcacttagcaggctggagtgcagtggcccagtcttggctcactgcaacctccgcctcctgggtttaaatgattctcctgcctcagcctcagggcggatcacctgacatcaggagtttgagaccagcctggccaatatggcgaaaccccatctctactaaaaatactaaaaaaaattagccaggcatggtggcacgcacttgtagtcccagctacttgggagactgaggcaggagaatcgcttgaacccaggatgttgaggttgcagtgagctgagatcacaccatcacaatccagcctgagtgacagagtgagactccatctgaaaaaaaagaaaaaacaattagcctggcatggtggcaggcacctgtaatccctgctacttgggaggctgaggcaggagaattgcttgaacccgggaggtggaggttgcagtgagctgagatcgtgccattgcattccaggctgagcaacaagagcaagactccgtctcaaaaaaaaaaaaaaaaaaaaaaaaaggccaggtgcagtggctcacgcctgtaatcccagcactttgggaggccaaggtgggtggatcacctgaggtcaggagttccagagcagcctggccaacattgtgaaacccccgtctctactaaaaatacaaaaattagctgggtgtgatggcatgtgcctgtaattccagctactcaggaggcagagacaggagaattgcttgaacccaggaggcggaggttgaatgagccgagattgcgccatcacactctagcctcggcgacagagcaagactccgtctcaaaaaaaaaaaaaaaaaattagcttctacctcattaatcctaagaactcatacaaccaggaccctggagtcgattgattagagcctagtccaggagaatgaattgacactaatctctgcttgtgttctctgtctccagcaattgggcagatgtgtgaggcacctgtggtgacccgagagtgggtgttggacagtgtagcactctaccagtgccaggagctggacacctacctgataccccagatcccccacagccactactgactgcagccagccacaggtacagagccacaggaccccaagaatgagcttacaaagtggcctttccaggccctgggagctcctctcactcttcagtccttctactgtcctggctactaaatattttatgtacatcagcctgaaaaggacttctggctatgcaagggtcccttaaagattttctgcttgaagtctcccttggaaatctgccatgagcacaaaattatggtaatttttcacctgagaagattttaaaaccatttaaacgccaccaattgagcaagatgctgattcattatttatcagccctattctttctattcaggctgttgttggcttagggctggaagcacagagtggcttggcctcaagagaatagctggtttccctaagtttacttctctaaaaccctgtgttcacaaaggcagagagtcagacccttcaatggaaggagagtgcttgggatcgattatgtgacttaaagtcagaatagtccttgggcagttctcaaatgttggagtggaacattggggaggaaattctgaggcaggtattagaaatgaaaaggaaacttgaaacctgggcatggtggctcacgcctgtaatcccagcactttgggaggccaaggtgggcagatcactggaggtcaggagttcgaaaccagcctggccaacatggtgaaaccccatctctactaaaaatacagaaattagccggtcatggtggtggacacctgtaatcccagctactcaggtggctaaggcaggagaatcacttcagcccgggaggtggaggttgcagtgagccaagatcataccacggcactccagcctgggtgacagtgagactgtggctcaaaaaaaaaaaaaaaaaaaggaaaatgaaactagaagagatttctaaaagtctgagatatatttgctagatttctaaagaatgtgttctaaaacagcagaagattttcaagaaccggtttccaaagacagtcttctaattcctcattagtaataagtaaaatgtttattgttgtagctctggtatataatccattcctcttaaaatataagacctctggcatgaatatttcatatctataaaatgacagatcccaccaggaaggaagctgttgctttctttgaggtgatttttttcctttgctccctgttgctgaaaccatacagcttcataaataattttgcttgctgaaggaagaaaaagtgtttttcataaacccattatccaggactgtttatagctgttggaaggactaggtcttccctagcccccccagtgtgcaagggcagtgaagacttgattgtacaaaatacgttttgtaaatgttgtgctgttaacactgcaaataaacttggtagcaaacacttcca

SEQ ID NO: 6 - DNA, 84761 bp, Homo sapiens
  source 1..84761: mol_type = genomic DNA; note = BRCA2_gene
agaggcggagccgctgtggcactgctgcgcctctgctgcgcctcgggtgtcttttgcggcggtgggtcgccgccgggagaagcgtgaggggacagatttgtgaccggcgcggtttttgtcagcttactccggccaaaaaagaactgcacctctggagcgggttagtggtggtggtagtgggttgggacgagcgcgtcttccgcagtcccagtccagcgtggcgggggagcgcctcacgccccgggtcgctgccgcggcttcttgcccttttgtctctgccaacccccacccatgcctgagagaaaggtccttgcccgaaggcagattttcgccaagcaaattcgagccccgccccttccctgggtctccatttcccgcctccggcccggcctttgggctccgccttcagctcaagacttaacttccctcccagctgtcccagatgacgccatctgaaatttcttggaaacacgatcactttaacggaatattgctgttttggggaagtgttttacagctgctgggcacgctgtatttgccttacttaagcccctggtaattgctgtattccgaagacatgctgatgggaattaccaggcggcgttggtctctaactggagccctctgtccccactagccacgcgtcactggttagcgtgattgaaactaaatcgtatgaaaatcctcttctctagtcgcactagccacgtttcgagtgcttaatgtggctagtggcaccggtttggacagcacagctgtaaaatgttcccatcctcacagtaagctgttaccgttccaggagatgggactgaattagaattcaaacaaattttccagcgcttctgagttttacctcagtcacataataaggaatgcatccctgtgtaagtgcattttggtcttctgttttgcagacttatttaccaagcattggaggaatatcgtaggtaaaaatgcctattggatccaaagagaggccaacattttttgaaatttttaagacacgctgcaacaaagcaggtattgacaaattttatataactttataaattacaccgagaaagtgttttctaaaaaatgcttgctaaaaacccagtacgtcacagtgttgcttagaaccataaactgttccttatgtgtgtataaatccagttaacaacataatcatcgtttgcaggttaaccacatgataaatatagaacgtctagtggataaagaggaaactggccccttgactagcagtaggaacaattactaacaaatcagaagcattaatgttactttatggcagaagttgtccaactttttggtttcagtactccttatactcttaaaaatgatctaggacccccggagtgcttttgtttatgtagcttaccatattagaaatttaaaactaagaatttaaggctgggcgtggtggctcacgcctgtaatcccagcactttgggaggccgaggtgggcggatcacttgaggccagaagtttgagaccagcctggccaacatggtgaaaccctatctctactaaaaatacaaaaaatgtgctgcgtgtggtggtgcgtgcctgtaatcccagctacacgggaggtggaggcaggagaatcgcttgaaccctggaggcagaggttgcagtgagccaagatcatgccactgcactctagcctgggccacatagcatgactctgtctcaaaacaaacaaacaaacaaaaaactaagaatttaaagttaatttacttaaaaataatgaaagctaacccattgcatattatcacaacattcttaggaaaaataactttttgaaaacaagtgagtggaatagtttttacatttttgcagttctctttaatgtctggctaaatagagatagctggattcacttatctgtgtctaatctgttattttggtagaagtatgtgaaaaaaaattaacctcacgttgaaaaaaggaatattttaatagttttcagttactttttggtatttttccttgtactttgcatagatttttcaaagatctaatagatataccataggtctttcccatgtcgcaacatcatgcagtgattatttggaagatagtggtgttctgaattatacaaagtttccaaatattgataaattgcattaaactattttaaaaatctcattcattaataccaccatggatgtcagaaaagtcttttaagattgggtagaaatgagccactggaaattctaattttcatttgaaagttcacattttgtcattgacaacaaactgttttccttgcagcaacaagatcacttcattgatttgtgagaaaatgtctaccaaattatttaagttgaaataactttgtcagctgttctttcaagtaaaaatgacttttcattgaaaaaattgcttgttcagatcacagctcaacatgagtgcttttctaggcagtattgtacttcagtatgcagaagtgctttatgtatgcttcctattttgtcagagattattaaaagaagtgctaaagcattgagcttcgaaattaatttttactgcttcattaggacattcttacattaaactggcattattattactattatttttaacaaggacactcagtggtaaggaatataatggctactagtattagtttggtgccactgccataactcatgcaaatgtgccagcagttttacccagcatcatctttgcactgttgatacaaatgtcaacatcatgaaaaagggaaatgattccatagcgttattatgaaagtagttttgaactgtaatggtagaggatgaatagctcacaatacaaatttgtcatttccctttaagagagaattcccattttatgtgagagtccacatgttcctcatacccatagtttgccacatcttgagtactcttcagaattatttgaattttttgaattttatctgtggaatgtatttttttttttttcttttttgagacacagtcttgctctgttgcccaggctggaatgcagtggcgtgatctcggctcactgcaaccaccgcctcctgggttcaagtgattctcctgtggcagcctccggagtagctgggactacaggcgtgtgccaccatgcttggctaattttttgtgtttttagtaaagatggggtttcaacgtgttagcaaggttggtctcgatctgacctcgtgatctgctcgcctcagcctcccaaagtgttgggattacaggcgtgagcccccgcacctggccgaattttatcgtggaatgtattcttaatgtgaatagtttttgattccgaaccatgaataataagaaaataaataaaatttaaatgaaaataaaagctaatatatacagcttttaataatatagttaaatgccatcttgtaacttttgtgaactcttgttacacctttctatagattcgcaagagaatggattaatgatcttgtttaattaatatgccttaacaaaagtaatccatagtcaagatcttaagcatttttttccttatgatctttaactgttctgggtcacaaatttgtctgtcactggttaaaactaaggtgggattttttttttaaatagatttaggaccaataagtcttaattggtttgaagaactttcttcagaagctccaccctataattctgaacctgcagaagaatctgaacataaaaacaacaattacgaaccaaacctatttaaaactccacaaaggaaaccatcttataatcagctggcttcaactccaataatattcaaagagcaagggctgactctgccgctgtaccaatctcctgtaaaagaattagataaattcaaattagacttaggtaagtaatgcaatatggtagactggggagaactacaaactaggaatttaggcaaacctgtgttaaaatcttagctcattcattaattgtgtcatgctgggcaaatcagtctctctggcctctttttcctcactcgaaaaatggagacgatgaaaataatgtctcataggtttggattaaattaaataatgtaggtacttagtaaatgttctctttcatccctcctttgataaatttgccaactgagatttgctgaattacgtctttcttatgccaaaaaaacctaggacttgttttgatgttaattaaactaaactatatttctgcaagctatcacagaggacagagattattttaccgatatactataagtatcatgatttggaaggagtttccctggcgtaggtgccgcatgtttctaagcaattatgtaataagattatatattcagtcattcaaataattattacctacttgacataagtaatgaactttcccttttcttcagagtgttaatctctagtaaggggaataaagagtacacagataaagtatagtgtaaggttgaatgtagtatgtgctaagagaaaaatataaaaaagtataatgagagttgagaagaaagagcaaatagtattgggcaaagttaggcaattattcctttgagctaaaccttgaaggataggtgagagattaagaaatttgaagatgtggtagagtgataatgttctaggcagagggaacaacatgaggaagaatatgtagtgtgttcaggaaatagcaagtaattcaggttggctttggttgttttgtgtctgaaagggaccaatagacaaggcaaaaaggcagactaaaggcaggcattgaatgccaagctaaagaaattgaatttgtttggttggttggtgagcagagaaatcacatgcaaatttcatcatgctacttattgtgtcaaaccttagatcacctccctttgtccttatagcaaaatctaaacttgatatggctttcaagttcctttgtgatcaggcccctgatttacactcttggctcagcttgccatattcatcctctcacctatcttcatttgccattcattcctactgaatttcttttcgttaccaaaaccacaatgctctctggctctttattaaacatattgttacctctacccacaacctactttttccctactttttgtctagctaatttgcgtgctcgtctttcagatcttggcttatttctgcttctgagaaatacttcctgtctgccctcgttgagcttctagtgaaggagacatacataagcaattatagtgtgatacatgctttgaaagaaattcatggctatagggagtgcatatacaaagggaatataggtaatgggcaaatatttacatgtatgttattggataccaaatggtatacataggattcagtaaatatttgtagagtgagtattagtattatttgctttagaaagcctaatgatcaaacagcagtctttggagataacgtttttcaaaatgtcatgtctgtgccattagaatcttctagactgctcattgaaaggacagattccaggccccactctgaatctcttaatttataatttttggaaatgatgcccatgagtctacattttaaactacctgaatgatccctatagaaagagaaaactggaggtaggaagatcagttaggggatgtgtaatggtctaggtgatagagacaagtgcctgaattacagtaataacagtgaaagtaaatatggaacataaaactataggaccttgcagtagtctagatatggaggattcaaaaaaaggaacaaatgacagggcaaagcatatgcagaacacagtagtaacagtcatagaaatggataagggagtcatccattctgcaaatacttagtgcttacttgtgtctggcaacctgctcggcattaaggatacaaatatgaataagatgtcctttgacctctaagtactcagtctcgtaagcacgtcttgtaagcacatcttggttgcttccataaaaataaatacactagtgtgatatgttataagagcatgtaccaagtgcatgaaaagtgagcagccatctctggttggtcagaaaaagctccataaagcagtttttgctgaatcttgaaagatatacctaaggtcaaatggttaattctttaatcataacctgctagaattgatctataaccaaggaaggatagtaaggaattaataaggccactctcaactcactgcaaaggagttaactttttgaaggctgtaatacataaatctgctgactagtctcttgagaccttttgcttttacgtttactttagattcagtattgaaaagtaagagtaatggacttaagctgtgtttttcaacctgttttgttcagttctaacatgtaatattttttaaaaaattattcctaaagttctatgaggaattgtgctgtttctgcctctcagcagtccttccttttgcattaaatcataggcatttctgttaccattcttcagcttattaatgagatcctcaggttatttgggaaatgtttatttggtaattaactctttttcacctagttcatttttttaacttttttttttaaatagccgagtttcttttcattgctgaactaaaatggatgtgttattattagctgaactccttagtttactttagagttcaccctttgtatggttctatggattttgacaaattgtataatgtcgtatatctgccattatggcattatacagaataattttgctgccctaaaaatctcccgagttccacctgctcacccatccctcctcctgagcccctggcagccactgatctttttactgtctgtatagttttgccttttccagaatgtcatgtagttggaatcatacagaatatagcattttcagactggcttctttcacttagcaatatgccgagaccagctcgattgtagagaccctaacccagcggcactagaggaattaaaggcacacagaaatatagcggtgtggagtgggaaatcaggggtctcacagccttttgacagcaagccagtgataagcattgtttctatagattatagattaactgaaagtattccttaggggaaataaagggctgggccgaagtaaagggatgggtctggctagttatctgcagcaggagaatgtccttaaggcacaggtcgctcatgatagtttgtggtttaagaacgcctttaagcggttttctgccccgggtgggccaggtgttccttgccctcattccggtaaacccacaagcttccagcgtgggtgtcatggccatcacgaacatgtcacagtgctgcagagattttgtttatggccagttttggggccagttcccaacagcaatatgtgtttaaggttcttccatgtcttttaatgatttcatgctgaataatattccatcgtattgatgtaccacagcttgtttatccattcatctattgaaggacatcttgattgcttccaaattttggcaattatgaataaagctggtataaatattcacatacaggtttgtgtgtgaatatattttcaactcattttggttcacaccaaagagcacgattgtgggatcatatagtaagagtatgtttagttttatgagaaactacaagctttcttccaaagtagctgttgcattttgtattcccaccagcagtgaatgagagttcttgttgctcacatcctcaccagcatttggtgtgtcagtgttttgaattctagccattctaacaagtgtgtagtggtacctcattgtttgttttatttaattttttttttttttttttggagatgaaatctcgctttgtcgcccaggctggagtgcagtggcgtgatcttggctcactgcaagctccgcctcccaggttcacgccattctcctgccttagcctcctgagtagctgggactacaggcacccgccaccacacctggctgatttttttgtatttttagtagagacggggtttcactgtgttagccaggatggtcttgatctcctgacctcgtgatccgctcgcctcggcctcccaaagtgctgggattacaggcgtgagccatcatgcccggcctgttttattttttaaagtcaattttctttcaagaattagctactttttagtatctttaattaaaaatctcattagagaaggaggttggatattttgttgaagtggggtttttaagttacacatccatttgctttattagtgattatgtctagtccatgttaacttgaaaaatgagactataatgagacattttatttaggctgctacaaacagttttaaatttggtcttcactttattttagtaacattgatagagcttatttttcccaaaagctaagttagagattataggaccaaccgaagcaactattttctaagagtaataataagtgactcaggtgccaaatttgtagttaccatcaactattggaaccatatgagtacttaatgccctggagagtcaaatataatctactctaatacagaaaatagaaatattgaaaaactgtaaattggatttcatattgttaaagccacctatagctttagaaactctgaacattattttcttagaaaatggatgtgttcaataagaatagaaattatgtattactgtctgcaactcactttgtctaattatatccaatttattcatccagtcaatatttcaggagtgactaatataccagacatttttgtagttgctagggatacagtgacaaataagacaaaatctctacctcagattgctcacagcctagtagggggaaaaagaacagtgtatgatcaaactcttcagggaacacataggggggcaaacacttaatcttaccttagggatcactacagttttctggaggaggtagtttctaaatggaagcctgaaagagttgttccaggtcaagaaaagcaaagaaggggaaacagcttgtacaaagtcctagaggttaaagaaaacattctttcaggatatgcaaatggttgggtatgggtaaaaagtagactgtaaaagaatggcatcataaaaattaagtaaattgtcacataaatatatatatttcttatgtacccacaaaaattaaaaatgaagaaattaagtaaattgtgaaaggccttcatactatggagtttgacttgatcttgaaaagtaagatcttgaaaggtttttagcacaagtgatattgtcagatctggtacattggtaggttttcagtaaatgtcttcccttactccttttttctctttccttctgcttttgtttaaagcgacaagatgttgctcttttcccaggctggaatacagtggcatgatcatagctcaagctcctgggctcaagtgatcctcccgcctcagcctctcaagtagctaggactacaggcatatcaccacaccagcgttttctttgtagaggcagagtctcactctgttgctcaggcaggtgttgaactcctgcctcaagcaatcctcccacctcagcctcccagagccctcaaattataagccactgtgctcggggcatcctttttggggggtaatcagcaaactgaaaaacctcttcttacaactccctatacattctcattcccagtatagaggagactttttgtttttaaacacttccaaagaatgcaaatttataatccagagtatatacattctcactgaattattgtactgtttcaggaaggaatgttcccaatagtagacataaaagtcttcgcacagtgaaaactaaaatggatcaagcagatgatgtttcctgtccacttctaaattcttgtcttagtgaaaggtatgatgaagctattatattaaaatatttaaatgaaacattttcctacatatatttgttctataaagatgaatctgatttttatgctaatattttggctaagagcctggtagaagatcttacatttttaaataatcttttaggttgagtcctttaatagaatagtttttacattagaaacatgtaagttgttgttcttgtgatgttgaattggctggttttctgtatattctgtgattttttaagtaacaaaaataacagtggtgaaaagcagtaagtcagtccttgaattatcaatttaaaataaattgtgtacttttcatctttggagagaatatgatttactttacaaattttttttttgttttttttttttttgagatggagtctctgtcacccaggctgtagtgcagtggtgcgatctcagctcactgcaagctccgcctcccgggttcacgccattctcctgcctcagcctcccaagtagctgggactacaggcgcccgccaccatgcccggctaattttttgtatttttagtagagacggggtttcaccgtgttagctaggatggtctcgatttcctgacctcgtgatccgcccgcctcagcctcccagactgctgggattacaggcgtgaaccactgtgcccggcctactttacaaaatttttgagtttaaaatacacggtttccagcagctgaaatttgtgagtacatatgtgttggcattttaaacatcacttgatgattatttaatgcttcatgagagatttactttttaaaatgtaatataaaatatctaaaagtagtattccaacaatttatatgaatgagaatcttcttttaaaaataagataaactagtttttgccagttttttaaaataacctaagggatttgctttgttttattttagtcctgttgttctacaatgtacacatgtaacaccacaaagagataagtcaggtatgattaaaaacaatgctttttattcttagaatactagaaatgttaataaaaataaaacttaacaattttcccctttttttacccccagtggtatgtgggagtttgtttcatacaccaaagtttgtgaaggtaaatattctacctggtttatttttatgacttagtaattgagaatttgacaatagcgttatacctttgccctgagatttacaaatctgtacctagcattctgcctcatacaggcaattcagtaaacgttaagtgaaataaagagtgaatgaaaaaataatatccttaatgatcagggcatttctataaaaaataaactattttctttcctcccagggtcgtcagacaccaaaacatatttctgaaagtctaggagctgaggtggatcctgatatgtcttggtcaagttctttagctacaccacccacccttagttctactgtgctcataggtaataatagcaaatgtgtatttacaagaaagagcagatgaggttgataattgtcatctctaatacttctgttaaaaggaaatatgaaaagaaaatattagataatgtctttgataagtgtgttagtaactgacaataattttattctattaagtgtagattggaataaatacaaatacatttagtggtagtccagtggtgtcaagcattatgttttagtacgatgtgattaacgtagaatagcttacaaatattcctttactggcctatataagcgtttaagaggcagtatttggtgtgactgaattctttttacaaatgattgtggtaattggggcattaaagcagcattaaataagcttttgttttctctacttaaatgtgttctaaggtctgtattgccagtagtactgaattgaggtcttaaattccacaagtgtaattacacaactatgtgataaactgcaatatttatccattcattaaactgtaaactctttgcagtctcaccacagtttctcttactaggatctagaaatatttcctattgtaggctggttgcagtggctcacgcctgtaatcccaacactttgggaggctgagaagggtggatcacgtgaggccaggagtttgagagcagcctgtacaacgtggtgaaaccctgtctctactaaaaataaaaaaattggccaggtgtggtaacacacacctgtaatcccagctacctgggggctgaggcatgggaattgcttgaacctgggaggcagagggtgcagtgagccgagattgtgccactgcactccagcctgggtgacagggaggctgaggtgggaggatcacgaggtcaggagatcgagaccatcctggctaacgtggtgaaaccctgtctctattaaaatagaaaaaattagctgggcgtggtggcagacacctgtagtcccagctactcaggaggctgaggcaggagaatggcatgaacccgggaggcggatcttgtagtgatctgagatcatcacgccactgcactccagcctgggcaacagagcaagactctgtctcaaaaaaaaaaaaaaatcctgttataaaactacttaaaaatctctgagtagctgagatttggctaatcatgacttagtatttgaaaagttgtgactattttttttttttttaattgagacaaggttcttctctgttgcccaggctggagtgcagtggcaccgtcgcagttcactgcagcctcaacctcccaggctcaattaatctttcttcctcttagccttccaagtatctgggactacaggtaccatgccaccagtatactaccagtcctggctaattttttttgtattttttgtagagatgggtcccgccatgttgcccacacttgtctcaaattcctgagctcaagcagccaccacacccacctgtgaccattcttttttatttttatgagataataaacatacaagtttaaagaaatgtctgtacataaatgtgattatagtacaaacaagtatttggaagttcatctaaacaaatgcatcacagtttataggcaaaacatgaaagattggataataatgggaaaaaaagtaaatattcaccaacattctttctcttttttctttttcgttttttttttttttgaggcggagtcttgcccttttgcccaggctggagtacagtggcaccatctcggctcacagcaacctctgccttctgggttcaggcgattctcctgccttagactcccgagtagctgggattacaggcacccaccaccacgcctgactaatttttgtatttttagtggagaggaggtttcactgggttggccagggtggtcttgaactcctgacctcaagtgattcgtttgtctcagccacattttttttgtctaagaagatactgggccagatcattgtttctcaaattgcagattatgacctgttcatagttgtgaaacttattttgtgagtcgtatatgctctttttaaatgaaatgaaaattctgagtacatcacatgtagttagggtttagaaaataaaaaatacaatatatctagttaaatttggacttcaggtaaacagcgaataattttgagatatacttaacactaaaaaattattcattgtttatctgaaattcaaatttaatgaggtgtcctgtattttatccagaagtcctacacacagtaaagtttgttttgtaaaacttttttacttaacctttgtgtgcccatgtgtgtgtgcagtcataaagtgtgtgtgtgtgtgtgtatttaaaaaactaggttgtactcaaagcctgagcttaatttattcccaaaccagtattacattttgtttattctagcaaaatagcattctgttttgattcctctttagctgggagtaagttaaccctattctgttgcttagatgaaataatatggataaaatcattttgaaaatatgtatttaatatatagtatgcctttaggctgtagtgttgtctaaatgaatgctaaagtctccaagctttagcttttaagtcataacctcacagcatcatctgactttccaactcattgtggacagtattaccataaagtaatgatcaccaagccatatcttaccaccttgtgagtagtactaaggaagtaagtatagtttattcactgtgttgattgacctttctaattactatacttaagtacttgaatcaattcattttgtttcaaatgtgtcatgtaatcaaatagtagatgtgctttttgatgtctgacaaaaaataagtttttgcattctagtgataatatacaatacacataaatttttatcttacagtcagaaatgaagaagcatctgaaactgtatttcctcatgatactactgctgtaagtaaatatgacattgattagactgttgaaattgctaacaattttggaatgccttgttaaattatttatcttacatttttaatttcctaatctgtaatttatctaagcctttgagaaagtctctaaacctggtcctatatgtgattttaacttcctgtgaaactctgctgtctctctgttaaagttgcatatatacaatatataccgtagtcccctattcatggggtatacattccaatatcccccagtgaatgcttgaaaccttagatagtaccgaaccctatatatatatattaaaaatgtgtagtatttatatatatatacctataatctttttttctataagcacataccctgtgataaagtttaattcataaattaggcacagtaagagattaacaagaactaataataaaataggacaattataacaaaataccgtaataaaagttatgtgaatgttgtctctctgtctcaaaatatcttattgttctgtactcatgtggcagcagcttcatcagcagatgtggcctctccagtaatttttatatttttcagtccaaacctattcttgaatctgtgtaaccaaccatcccttacttgcagtaaatggcttggtgtcattcatttcaggggatcccttactgaagttttcgtttaggctctatgctttctggcgtaatatgtagctgtcaatcaaaacaacctgttcatgttttctacccacaaatgtaataccttttctacttctatggtgcactgtgtggccacaacatttgcagtttgaggtgtgacagcaaaaccagctcatatgtctttctccttcacaatctcacagatagatttgttcttaccatagatgtcgcagtacaatttttttcctttccttaagtcgagaactttcactgtttcaattaaaggaagcactttatggcttctttttggcatatttgaattgccagcatcattatacttgtgctttggggccattgttaagtaaaataagggtgacttgaacacaagcactgtggtaccacaatagccgatctgataaccaagacaactactaagtgactaataggtgggtaccatatacagcctggatacgctggacaaagggatgattcatgtcccaagtgggatggagcaagatggtgcaagtttttttttctccatttccattttcctttcctaagatttccacatcctagtggtgcaagatttcatcacactactcaggatgacacacaatttaaaacttactaattgcttacttctggaattttccattaaaaatttttggacctaggttgattgcagataactgaaatcaccaaaagtgaaaccatggataaggggggactactactatatgtgcattgagagtttttatactagtgattttaaactataatttttgcagaatgtgaaaagctatttttccaatcatgatgaaagtctgaagaaaaatgatagatttatcgcttctgtgacagacagtgaaaacacaaatcaaagagaagctgcaagtcatggtaagtcctctgtttagttgaactacaggtttttttgttgttgttgttttgattttttttttttgaggtggagtcttgctctgtcacccgtgatctcggtttaccgcaacctctgcctcccgtgctcaagcgatcctgcctcagcttgccaagtagctgagattacaagcatgcaccaccatgcccaactattgtatttttagtagagatggcatttcaccatgttggccaggctggtctcaaatggtcgtgagccaccatgcccagcctgaactactctttttaattggcaccattgaaggattgctcctcttttcttaaagagaaaatatattacctttcctttcttgactactgaagtagtattttatctcaaagtattgagagtagaaactaacttggtgtgcctgtgatcccagctactcaggaggctgaggtgggaggatcgcttaagcccaggcggtcaaggttgcagtgagctgtgtgtgtgccactgcactcccacctgggcaacagagtgagaccgtgtctcaatggaaaaaaagagaaactaatttgatttcgatgacagtatttaaatactgtgtaagacagtactatttaatatgtggttgtgacacaaaaacaaagcctattgaaaattttcagagacaataagatatataattaacaaaatctgagctttttttttttctaattagaaagtaaatgtggtttagatataccatagtttacctaatcaggtcatggaatattgcatttttcttagtatgtgtgtatgtctgtataactgtgtaggatttgatatctgtttttgtctgtgtggtatcatgtacgtatgtatatgcatatgtaaaatcagatttacccttgttatagggccacagaattgatttggaacatctgttttgataggtcttagaatatttaattgtatatatagtaagattaggtgagttttaattgtgtagaactgctaaagaaaggtttttagggattgttgtatgaataaaaggctttaggttcattggaatcaggggaatcaggctttactagaagaacaggagaaggggtgactgaccgaaaaataaaatgccaagtactcagaataaccctttaaatactgatatgtaatatttagcacattctacataaactgtttctatgagaaaggttgtgagaataatataaattatatggcttataaaatattaatgtgcttctgttttatactttaacaggatttggaaaaacatcagggaattcatttaaagtaaatagctgcaaagaccacattggaaagtcaatgccaaatgtcctagaagatgaagtatatgaaacagttgtagatacctctgaagaagatagtttttcattatgtttttctaaatgtagaacaaaaaatctacaaaaagtaagaactagcaagactaggaaaaaaattttccatgaagcaaacgctgatgaatgtgaaaaatctaaaaaccaagtgaaagaaaaatactcatttgtatctgaagtggaaccaaatgatactgatccattagattcaaatgtagcaaatcagaagccctttgagagtggaagtgacaaaatctccaaggaagttgtaccgtctttggcctgtgaatggtctcaactaaccctttcaggtctaaatggagcccagatggagaaaatacccctattgcatatttcttcatgtgaccaaaatatttcagaaaaagacctattagacacagagaacaaaagaaagaaagattttcttacttcagagaattctttgccacgtatttctagcctaccaaaatcagagaagccattaaatgaggaaacagtggtaaataagagagatgaagagcagcatcttgaatctcatacagactgcattcttgcagtaaagcaggcaatatctggaacttctccagtggcttcttcatttcagggtatcaaaaagtctatattcagaataagagaatcacctaaagagactttcaatgcaagtttttcaggtcatatgactgatccaaactttaaaaaagaaactgaagcctctgaaagtggactggaaatacatactgtttgctcacagaaggaggactccttatgtccaaatttaattgataatggaagctggccagccaccaccacacagaattctgtagctttgaagaatgcaggtttaatatccactttgaaaaagaaaacaaataagtttatttatgctatacatgatgaaacatcttataaaggaaaaaaaataccgaaagaccaaaaatcagaactaattaactgttcagcccagtttgaagcaaatgcttttgaagcaccacttacatttgcaaatgctgattcaggtacctctgtctttttttttttgtaaatagtacatatagttttatagatgacgattccttctgtgtttttttctgctttttaaaatcttcatatcttatatttaatcttaggcatcatctgtatacatgattgtttaggtctttaattaccagtgtttagaatcaggtcactcaaacatggtagataagtttgcatagtttgtgtatatccatcactcttgagacagttttattttaagttccggggtacatgtgcaggatgtgcaggtttgttacataagtaaacgtatgccatgttggtttgctgcacctgtcaacccttcacctgagtattaagcccagcatgcattagctatttttcctggtgctctccttccccccacacacccccacctcctgacagaccctagtgtgtgttgttcccctccctgtgtccgtgtgttctcattgttcagctcccacttatgagtgagaacatgtgatgtttagttttctgttcctgcattagtttgcttaggataatggcttccagctccatctgtgtccctgcaaaggacgtgatcttgttcctttttatggctacatggtattccatggtgtatagttccacattttatttatccagtctatcattgatgggcatttgggttgattccatgtctgtgctattgtgaatagtgctgcagtgaatgtacaggtggatgtatctttataatacaatgatttatcttcctttgggtatataccccgtaatgggattgctgagtcagatggtatttttggttctaggtctttgaggaattgccacactgtcttccacaacggttgaactaatttacattccagccaacaacttgagacagtttttgactcataaacattcagagcttggctagctaattcctgctttaatttaaaaagtgtttattatatgcaaattggacaactcatataaatatgtggtgctacttactatgtattttctctaaagcatgttaaaaaaataggctagatatagtggctcatgcctgtaatcttagcactttgggaggctaaggcaggaggatcacttatggtcaggagtttaagaacaccctgggcaacatagcgagaccccatctctacaaaaaatttaaaatacccaggcatggtggcatgcttctgatgttgtagctactcaggatgctcagacaggaggatcacttgagcccaagtgactgaggctgcagtgaaccaaaattgtaccagtgcactccagcctgggccacaaaatgagaccttgtccctgaaaaaaaaaaaagaaaaaaaaaatttaaatagaggaaatactagctaagtttaatgtaggccagttctaaaataatgatttattgctgctgttgttacataattttcttaaatattttaaagattgcatactgttactgctctatttctgcatctccgtggtgtaactctgtcctctttgttgttgcaacagttcacttagcaactaaactgtatgtttacaaagtgattttatctccctatgagaagactttagtgaatagctcagtgaatagtagagttggtgagaccacagtacagaactgtttgaagtttgggttaaatttttagaggaaaatgtttgatactatgcatatcatagttaaagccaatgaaaaagctaatataggccaggcgcagtggctcacgcctataatcccagcactttgggaggccaaggcaggcagatcacttaaggtcaagagttcaagaccagcctggccaacatggtaaaaccccatctctatgaaaaaaaacaaaaattatccagatgtggtggcatgtgcctgtaatcccagctactcgggacgctaaggcaggagaatcacttgaacctgggagatggaggttgcaatgagctgagatcacgccactgcactccagcctgggtgacagaacgagactccatctcaaaaaaaaaaaaaaaaaaagctaatacatgtgatcactgatgaaatgcaattaagaactggttagtagaaaattcagagggtcaagaaatttaacagagcagttgaactcatttgcctttatcgttgagattagatcatctttcaggctgttagtatatggaccctgtttttaaaaattgtggttttgtttttttcaatgtgaaagaattaagaaaattgttacttttctaattccttttctgtgccttgcttttctgttcacaccagtattaacagcaatgaaattttttcaattttattttccaataaaaattactttgagttttttttatggtagctagctacttccttgacctagatactaattttgattgagttggtaactattattaaaaaaacaacttaggtctaatttatcttgagctaaaaaatgtaataactgaaaaatagagcatatttaggattctttctgctttaaatttgacattcagttattttcatgtaatttgtgttttgagcactaccttttaattaatttatttatttttattttttagagactgtctcattctgttacctagtctggagtgcactagtgtgatctcagctcaccgtagcctcaccctcctgggctcaagcagtccttgcacctcaccctcctgagtaactggcaccacaggcatacaccaccacacccagctaatttttatttttcatagagtcatggtctcactatgttgcccaggctagtctcgaactcctgggctcaagcagtcttcctgcctcagcctcccaaaagtgctgagattacaggcatgagccactgtgcccaaacactacctttttaacttagtgaaaaatatttagtgaatgtgattgatggtactttaattttgtcactttgtgtttttatgtttaggtttattgcattcttctgtgaaaagaagctgttcacagaatgattctgaagaaccaactttgtccttaactagctcttttgggacaattctgaggaaatgttctagaaatgaaacatgttctaataatacagtaatctctcaggatcttgattataaagaagcaaaatgtaataaggaaaaactacagttatttattaccccagaagctgattctctgtcatgcctgcaggaaggacagtgtgaaaatgatccaaaaagcaaaaaagtttcagatataaaagaagaggtcttggctgcagcatgtcacccagtacaacattcaaaagtggaatacagtgatactgactttcaatcccagaaaagtcttttatatgatcatgaaaatgccagcactcttattttaactcctacttccaaggatgttctgtcaaacctagtcatgatttctagaggcaaagaatcatacaaaatgtcagacaagctcaaaggtaacaattatgaatctgatgttgaattaaccaaaaatattcccatggaaaagaatcaagatgtatgtgctttaaatgaaaattataaaaacgttgagctgttgccacctgaaaaatacatgagagtagcatcaccttcaagaaaggtacaattcaaccaaaacacaaatctaagagtaatccaaaaaaatcaagaagaaactacttcaatttcaaaaataactgtcaatccagactctgaagaacttttctcagacaatgagaataattttgtcttccaagtagctaatgaaaggaataatcttgctttaggaaatactaaggaacttcatgaaacagacttgacttgtgtaaacgaacccattttcaagaactctaccatggttttatatggagacacaggtgataaacaagcaacccaagtgtcaattaaaaaagatttggtttatgttcttgcagaggagaacaaaaatagtgtaaagcagcatataaaaatgactctaggtcaagatttaaaatcggacatctccttgaatatagataaaataccagaaaaaaataatgattacatgaacaaatgggcaggactcttaggtccaatttcaaatcacagttttggaggtagcttcagaacagcttcaaataaggaaatcaagctctctgaacataacattaagaagagcaaaatgttcttcaaagatattgaagaacaatatcctactagtttagcttgtgttgaaattgtaaataccttggcattagataatcaaaagaaactgagcaagcctcagtcaattaatactgtatctgcacatttacagagtagtgtagttgtttctgattgtaaaaatagtcatataacccctcagatgttattttccaagcaggattttaattcaaaccataatttaacacctagccaaaaggcagaaattacagaactttctactatattagaagaatcaggaagtcagtttgaatttactcagtttagaaaaccaagctacatattgcagaagagtacatttgaagtgcctgaaaaccagatgactatcttaaagaccacttctgaggaatgcagagatgctgatcttcatgtcataatgaatgccccatcgattggtcaggtagacagcagcaagcaatttgaaggtacagttgaaattaaacggaagtttgctggcctgttgaaaaatgactgtaacaaaagtgcttctggttatttaacagatgaaaatgaagtggggtttaggggcttttattctgctcatggcacaaaactgaatgtttctactgaagctctgcaaaaagctgtgaaactgtttagtgatattgagaatattagtgaggaaacttctgcagaggtacatccaataagtttatcttcaagtaaatgtcatgattctgttgtttcaatgtttaagatagaaaatcataatgataaaactgtaagtgaaaaaaataataaatgccaactgatattacaaaataatattgaaatgactactggcacttttgttgaagaaattactgaaaattacaagagaaatactgaaaatgaagataacaaatatactgctgccagtagaaattctcataacttagaatttgatggcagtgattcaagtaaaaatgatactgtttgtattcataaagatgaaacggacttgctatttactgatcagcacaacatatgtcttaaattatctggccagtttatgaaggagggaaacactcagattaaagaagatttgtcagatttaacttttttggaagttgcgaaagctcaagaagcatgtcatggtaatacttcaaataaagaacagttaactgctactaaaacggagcaaaatataaaagattttgagacttctgatacattttttcagactgcaagtgggaaaaatattagtgtcgccaaagagtcatttaataaaattgtaaatttctttgatcagaaaccagaagaattgcataacttttccttaaattctgaattacattctgacataagaaagaacaaaatggacattctaagttatgaggaaacagacatagttaaacacaaaatactgaaagaaagtgtcccagttggtactggaaatcaactagtgaccttccagggacaacccgaacgtgatgaaaagatcaaagaacctactctattgggttttcatacagctagcgggaaaaaagttaaaattgcaaaggaatctttggacaaagtgaaaaacctttttgatgaaaaagagcaaggtactagtgaaatcaccagttttagccatcaatgggcaaagaccctaaagtacagagaggcctgtaaagaccttgaattagcatgtgagaccattgagatcacagctgccccaaagtgtaaagaaatgcagaattctctcaataatgataaaaaccttgtttctattgagactgtggtgccacctaagctcttaagtgataatttatgtagacaaactgaaaatctcaaaacatcaaaaagtatctttttgaaagttaaagtacatgaaaatgtagaaaaagaaacagcaaaaagtcctgcaacttgttacacaaatcagtccccttattcagtcattgaaaattcagccttagctttttacacaagttgtagtagaaaaacttctgtgagtcagacttcattacttgaagcaaaaaaatggcttagagaaggaatatttgatggtcaaccagaaagaataaatactgcagattatgtaggaaattatttgtatgaaaataattcaaacagtactatagctgaaaatgacaaaaatcatctctccgaaaaacaagatacttatttaagtaacagtagcatgtctaacagctattcctaccattctgatgaggtatataatgattcaggatatctctcaaaaaataaacttgattctggtattgagccagtattgaagaatgttgaagatcaaaaaaacactagtttttccaaagtaatatccaatgtaaaagatgcaaatgcatacccacaaactgtaaatgaagatatttgcgttgaggaacttgtgactagctcttcaccctgcaaaaataaaaatgcagccattaaattgtccatatctaatagtaataattttgaggtagggccacctgcatttaggatagccagtggtaaaatcgtttgtgtttcacatgaaacaattaaaaaagtgaaagacatatttacagacagtttcagtaaagtaattaaggaaaacaacgagaataaatcaaaaatttgccaaacgaaaattatggcaggttgttacgaggcattggatgattcagaggatattcttcataactctctagataatgatgaatgtagcacgcattcacataaggtttttgctgacattcagagtgaagaaattttacaacataaccaaaatatgtctggattggagaaagtttctaaaatatcaccttgtgatgttagtttggaaacttcagatatatgtaaatgtagtatagggaagcttcataagtcagtctcatctgcaaatacttgtgggatttttagcacagcaagtggaaaatctgtccaggtatcagatgcttcattacaaaacgcaagacaagtgttttctgaaatagaagatagtaccaagcaagtcttttccaaagtattgtttaaaagtaacgaacattcagaccagctcacaagagaagaaaatactgctatacgtactccagaacatttaatatcccaaaaaggcttttcatataatgtggtaaattcatctgctttctctggatttagtacagcaagtggaaagcaagtttccattttagaaagttccttacacaaagttaagggagtgttagaggaatttgatttaatcagaactgagcatagtcttcactattcacctacgtctagacaaaatgtatcaaaaatacttcctcgtgttgataagagaaacccagagcactgtgtaaactcagaaatggaaaaaacctgcagtaaagaatttaaattatcaaataacttaaatgttgaaggtggttcttcagaaaataatcactctattaaagtttctccatatctctctcaatttcaacaagacaaacaacagttggtattaggaaccaaagtgtcacttgttgagaacattcatgttttgggaaaagaacaggcttcacctaaaaacgtaaaaatggaaattggtaaaactgaaactttttctgatgttcctgtgaaaacaaatatagaagtttgttctacttactccaaagattcagaaaactactttgaaacagaagcagtagaaattgctaaagcttttatggaagatgatgaactgacagattctaaactgccaagtcatgccacacattctctttttacatgtcccgaaaatgaggaaatggttttgtcaaattcaagaattggaaaaagaagaggagagccccttatcttagtgggtaagtgttcatttttacctttcgtgttgccaatcactatttttaaagtgtttattcagtagacttggtatgctaacaattaagagtgttataaactatgtcttttcagccatttttgtgtagtcagtttgggggagtatggtttgatatacagatacacagattcagtattcgtatacagatttgatatcttggtatacagattcgatatctctgaatctgtataccaagaaatcatgttttaagggtctcaatatattttcaaaaagattattagtataataattgagaaattactgttaaaaagttttgagtttctctagaaaatttgaaactcttaacaaaacctgcataatactaacttaactgttttcatatacatagcaagttcagactctgacttatatgaactttaaaagttggtttccgggaggccgaggcgggcggatcacgaggtcaggagatcgagaccatcccggctaaaacggtgaaaccccgtctctactaaaaaaatacaaaaaattagccgggcgtagtggcgggcgcctgtagtcccagctacttgggaggctgaggcaggagaatggcgtgaacctgggaggcggagcttgcagtgagccgagatcccgccactgcactccagcctgggcgacagagcgagactccgtctcaaaaaaaaaaaaaaagttggtttccgattataccatttactgggtaatatatactacttagttacactacttacatagcttcagtttccttatctataaaatgcaaataacacctcccatgagggctgggcgtggcgctcatgcctgtaatcccagcactttgggaggccgaggtgggtggatcacctgaggtcaggagtttgagaccagcctgaccaacatggtgaaaccccatctttactaaaaatacaaaaaattagccaagcgtggtggcgcgcacctataatcccaactactccagaagctgaggcaggagaatcacctgaacctgggaggtggagggtgcagtgagctgacatcacaccactgctctccagcctgggcaacagagcgagactgtctcaaaaaaaaaaaaaaaaaagtgtatttaaagcacttagcagtgaacttgacatatagtaggcagagagcattcagtaagtgttggcttgctccctttttttcatttaggaagtgatctaaaaacagtattgttagtaaatggtatcttgatcttaatgttatgtggactattttaacttcccttttaaatgtatatatatctaacaacttagttcaactacagtcatgtgtcatttgacagggatatatgttctgagaaatagattgttagatttcatcattgtgggaacatcatagagtatacttacacaaacctaggtggtatagcctactatatacctaggctgtatggtatagcttattgctcctaggctgcaaacctatacagcatgttactgtcctgaatactctaggcagttttaacacagtggcaagcatttgtgtatgtgaacatagaaaaggtacagtaaaaatacggtattaaaatcttatggggctgggctcagtggctcatgcctgtaatcccagcactttgggaggctgaggcaggcggatcacctgaggtcaggagtttgagaccagcctggccaacatggtaaaaccttgtctctactaaaaatataaaaattagctgggcatggtggtggcacacgcctgtaatcccagctactagggaagttgaagcaggagaatcacttgaaccctggaggcagagatttcagtgagccaagatcgcaccactgcactcctgcctgggcgacagagcaagactccatctgaaaaaaaaaaaaaatcttatgggaccactattaaagtcttataggatgaccattgcatatgtggtctattgttgaccaaaatgtcattatgtggcaaatgactgcattaggttaaccttatacatacctatattaggtatgtatttggttttgtttttttgtgtgtgtttttttctattagtgtatctgactggtaataatcttaaataattgaatctgtttgttagttgcaattaaagcaaatgccaaaactccaacatttcagtggataatcttaaataactagttcctttttaaaaaacctataaactcataaaaatattttagttattagaactcttcctgtctagaccccatgtattacagagagacaccgaagttagtctcctcattcaaaaagtgccttttgcccctaagtcattctggtggatacagatttacttaatcaagtgttgtccaggtcacattcaatataggatttactttatggacaaagtagtacgtttatagtacttaaactatttgctgtcctttagtgtgaaattctgaggtatatatgcttaaagatatttgtaattcttttgtggaaaataatggctttatttatagcaacccattctgttcttgtgcatactgaagtatattgactttccacctagggaaaaaaaaaacaataactcagacttgtaaatgctttcaacggtgttactacttaatttccctcatttctgtaacatataagtgtataacttagtcagcttctggttactggaacagtacaggtcactgttaaacaattaaaccacttttataataatctaacacctcctaaagccttgcatggacatttttacttattaaattatacaaatttattccctgtaataaagcatcaaaaagcaaagtacctgttatatattatctcagcatgacatggaaatgcctaccttgaattatggtttaatcttaccctcttagcctctgtagaatttttaaataagaattgtttctattactagtactttaatgtaatttgataattgtaaaaagcctcttaactctaattcaaggacctacataataaattactccttcagttaatggctgcccccgtgctgaaaaaaaaaaaaaaaaagagagaaaaagtttatttgaagaaattttgttaggccttattgccagtaaacctagagttatatttagtgtcagtttttcaaaaagtagcttatctgtggtatctggtagcatctgtttatcctatttaggatttatcctgtttagaccctgttaaatagtggtgttttaaagtggtcaaaacagaacaaaaatgtaattgacattgaagactgactttactctttcaaacattaggtcactatttgttgtaagtatttttgtttaacatttaaagagtcaatactttagctttaaaaaaatggtctatagacttttgagaaataaaactgatattatttgccttaaaaacatatatgaaatatttctttttaggagaaccctcaatcaaaagaaacttattaaatgaatttgacaggataatagaaaatcaagaaaaatccttaaaggcttcaaaaagcactccagatggtaaaattagctttttatttatatctgttctccctctataggtatggtatataatattctgacctcaggtgatccacctgcctctcaaagtgctgggattacagacatgagccactgtgcctaatcaaggacctctttatactcttaaaaattactgaggacctaaaagagcatttgtttatgtggaatatatctattgatatttaccatattagaaatgtaaattgattaatgttaaaattagtaatattatgcgttggtcatttggaagatatgagttcactgagttatgcggatcttccgaaagttgacagttttattatgcagtattaaacaatcactttcattgatgccattaccgatcagaaaagtttaagtagtagaaagctgtcaagcttacagagccagatacaagcttcccaaaaattctgattttcatctaaaagcttgaatttttccccggcaataagtattgtcacttatttttcttgtaggtgacaagcttattttcattcatttttgaaaagatgtctgccgaatacccaagtctgaataactatagtttgttggttattctttcaagtaaaaggtatttcatgaaaaaatagctagtatagctcacaactcaatcatttaagtgtgttttcttgagaaacgcactgaagtatgcaagcataatataccaacagtacaaatatcaacagtgaaaaggacatacataacattttactaataagacagttttgacagcttggattccctaaaatggttgtagatacctaacaggattccactgatcatttcttgagaatcattgtcctataatatatacataataatctaaatttacaatatcagtattaactactgacaataaaactactaaggaaaatgtaagaattgtttgcagtttttgtccttagagtatataggttgagtatccctatctgaaatgcttgggaccaggactatttcagatttcagattttttcagattttgaaatgcttgcatatacaatacataatgagatatctggggataggactcaagtctaaacacgaaatttatttaagtttcataaacaccttatacatataacttaaatgtaattttatacaatattttaaataatttttgcataagacaatttaaattgtgatccatcacatgaggtcagatgtggaattttctactggcctcatgttggcactcaaaaagtttcaggtttgtgaccattttggattttcagattagggatactcaacccatatattattaagaatgtttagtcaaaatactgtgttcaaatgtcactcaaaataattcttccggatgtggttaccaatttgataattaggttacattcctttttttccatttgttttcaattttaggatttgtcttttcttatttaattttacatttgaataaataaaacattacatagttcattcatcagaactacaaaaaggtatacttagagtttttattcacccacctcttgcttactataggtaatcttttttagtgtttttttttcaggattctgtttaataaaaataagcaaatacatgtatatactcattaccctttcttactcaaaagatacagtatatacaccattttgcaccttgtttattggttgttgtttacttaagaattatttggagatgactccttaatgagtatatagagatcgtcctcattcttttttgtggttacatagtagttgatcatctggctgtgtcagtgtttcctagtttatttaaccaatttccaactagtggacttattgaagatttaattaggttccagttacatactgagaatgaacaatatctaaagcttagcttttaaaccttcataagactaaattttaaatttggtatttgcatcagaaattagctaacacctttgagttatgatggttaacatcaactgactaaatttatgctgatttctgttgtatgcttgtactgtgagttatttggtgcatagtcattatcaatttgtgaatcaatttattttcatagttaacatttattgagcatctgttacattcactgaaaattgtaaagcctataattgtctcaaattttttgtgtatttacagtaacatggatattctcttagattttaactaatatgtaatataaaataattgtttcctaggcacaataaaagatcgaagattgtttatgcatcatgtttctttagagccgattacctgtgtaccctttcggtaagacatgtttaaatttttctaaattctaatacagtatgagaaaagtctcgtttttataaatgaacatttctaaaaataatgacactaacgttaagaagttaacacttcccgttttataaaatttataaaatactttggtagtattttatagtgctgttcatatcattattttattttttaattttatgacagctttgtaaagtagacagattttattctaattttatggatgaagtactaaggttgagaggaattaaggaaattgctccgaatcagttaacaaaaagattgcagatattaaaaatatccttttatctctcctctctaaacctttaaaaaagtactaagatagtttttttaatgtataattcccaaggacaatgatgagaagaaacaacaaaagtttggaagccaaaaacataaaggatttagtaagcatgagaaagctaaaacctgacactagagcaaacagagatgctttcccctaaaaaacctgaaaaagattcaaattggcagcaacaggtacttctgaaggtgaagtagaaaataggaagattagttgaaattctttttaagaaacatctatatttcctcccccactgcaaataggcggttatccttcttctgccaggaaatcagaaggttgttcttgaaaaagatgaattgagaggattctgaattgaaggtgggctggagggaggggacaccaggcacaattgagggaaagatactaaaatgaaagatcagatacaaatctgtatgtcaagcagtgagacctagctccttcccacacttggttcccaaatgcaggccctctaggcatgagactggaagatttttttttcctagggaatatgcctgacccaatagaaaagaccaaaaaatactgacagttgaggatactcagatgaaacagtatagccagtcaccagaccaggaagttaactgttgacatgcacagagcttccaggaagctacttagtgcttcacttttaaataagaaaagatagtcaaagataactagtcattggaagaaagctactatgaaacatagtcaccaaagtacaaaatccatagcagaaaggaacctagaggaaatcgactatgaaaacttcataaaaacctactaatattctcaggtaagaaaagaaaaaatggccgtaaaataagaacaagttgctataaaaagctcttagaaattaaaaatatgatagcacaaataaattaactcagtagaaataatggaagaatcatgaaagttcccagaatacagaataaaatgaaaaaaggtatgaaaagtcaattctgtggatctatcatctgaaaatacagagtttgagaaggaaggcacagaagagaaatgaagaaagaaattttaaaataaatacataattttaaaagttctactagtactgaaggacatgagtttccttaattaaaagggcccactgagtgagcacacaagtaaaaatgacccacagtaaggcacatccttgtgaatttttagaataatagaggcagacaggaaccttaaattcattagaggaccaagaagttaggtttcaaattgtttcaagccataatagtatgaattctcttattatcaacaatggaatctagaagactgtagatcttatataatacagagaagtgccttcaaaatactgagagaaaatgatttccaacctagaatctgaattaagtgtgagggtagacatttttcagatgtgaagtactaaaagatctcttgtgcgcttttctcaggaaactaaccaaaacaaatgcatacaccaagaaggaggaaggtataggacttaagaaataagaattcaacatagaagagaggcaaagggagctttcaggatgatattgaagggagatcccagagtagctgtgttgctaagtctagaaaggcagctagactactttggaactgaagaagataagagactttggaagagtttgccttcaagataaaaataaagcagtacctgcatgttttaatgtattaggaaacttcttagtaaagatggtgaattgaggccaggcacagtggcttacacctgtaatccagcacattgggaggctgaggtgggtagatcacttgaggccaggagttcgagactagcctggccaacatggtaaaatcccatctctactgaaaatacaaaaattagccaggcgtggtggcacacgcctgtaatcccagctactccagaggctgaggcacaagaaccgcttgaacctttgaggtggaggttgtggtaaaattgcaccactgcacttcagcctgggtgacagagtgagactctgtctcaaaaaaaaaaaaaaaaaaaaaaagatggtgaattgaacatactcatatcctttctttgccttccaaacttttaccaaaacatcattgaagaaacttacacacacacaaaaaaaaaacaaggaaaataggaaataacaaagtaactaaatttctcaaagcatgcagaaggaaactgaatgaaagctggtggtggggacagcagagaaccaacgattttacactcaggtctcaaaagactaggaattggtggcttcatttcttatctttagaattgggtggtgcagaaggagggagccaaaatggaataagttgaaattatgtttaagaagcaatactcgccgggtacggtggctcacatggaggctgaggcgggtgaatcacctgaggtcaggaattcgagaccagcctggctaacatggtgaaaccccatctctgttaaaaatgcaaaaattagctcggcatggtagcatgcccctgtaatccagctactcaggaggctgaggtgggagaactgcttgaacccaggaggtggaggctgcagtgagccaagattgcgccactgcactccagcctggacgacagagcaagaccccacatcaaaaaaaaaaaaaaaaaagcagcagcagcaatactcatgaagctgggcaactgtctcctgcccgctctatgaaaagaaccagaggcttattctccagagaggatacagtagaaggtgaacacactaggcacagttgaaggcagaagcaactacttgaaagcaagaagaagttaatatatgcatattgaatgttgggatctcccctcaccaagcccttttccaccactcagcttccagaacatagacagctaagttttcactagtggaagtttccatttaatcaagctactgtgtagcttgcagtcaacaagttctatctttgtaccaagtgcttcaaaacagccttttggtccctcactcttaactataaacagacatccaaagattatgagacatcagaaaaagcaaaaataaaataaccaaaaaacacattaatgaaaacaacttagaagaaacattattcaaggagaagaaaaaatgtttttttaaaaactataatttgtgaacagaatgaaaagaggtttatatatatagctaagagtttagatgtgaataaacagtaagtacatagaaaataagcagattttaaaaattaactcaagagaaagcaaaagttgtaaaggaagtacactatttatatactacccattaatggccgggtgtggtggttcacgcctgtaatcccagcactttgggaggccgaggcgggtggatcacaaggtcaggagatcgagaccatcctggctaacatggtgaaaccccatctctactaaaaataacaaaacaaaattagccagacgtagtggtgggcgcctgtagtcccagctacttgggaggctgaggcaggagaatggcatcaacccaggaggcggagctttcagtgagccgagattgcaccactgcactccagcctgggcgagagagcgagactccgtctcaaaaaaaaaacaacaaaataaaaaaataaaataaaatatactgcctattaatactacatatactttatactgacttagccgtaatgtaaatgttgaacattgatagtgagaggtgaagctggctgggcttctgggtcgtgtggggacttggagaacttttctgtccggctaaaggattgtaaacacaccaatcagcgctctgtgtctagctaaaggtttgtaaacgcaccggtcagcactctgtgtctagctaaaggtttgtaaatgcaccaatcagcactctgtaaaatagaccaatcagcaggacgtgggcggggccaaataagggaataaaagctggccacctgagccagccccagcagccgctcggctccacttccatgccatggaatctttgttttttcactctttgcaatgaatcttgctgctgctcactctttagtgagcactacctttatgagctgtaacactcaccacgaaggtctgcggcttcactcctgaagtcagcaagaccacgaacccaccaggaagaagaaacaaccctgtacgtgccatctttgagagctgtaacactcactgggaaggtctgcggcttcactcctgaagtcagcaagaccacaaacccaccagaaagaagaaactctggacacatctgaacatcaggaagaacaaactcgggacacactatctttaagaactgtaacaccatgagggtccacagcttcattcttgaagtcagcaagaccaagaacccaccagaaggaaccaattccggacacagtagaattaaatacgtaatttaggaagatgaaaggcaagagtgtgtgtgtagtaaggtagaagctgtgttgacagagctgaattttcattttctgtaggggtacttcaagagaaaaagtcaagaagaaacatgtcacttagacatataaatatgataaaatcatctaaaactgtttaaagtagttgcaaaatcttttctagctgataaatttttaagcctaaaaatatcattgaaattattttaatgttacattttattttattttatttatttatttatttattttgatacagagtctcactctgtcgcccaggctggagtacagtggcacgatcttggctcactgcaacctctgcctcctaggttcaagcgactctcctgcttcagcctcccaagtagccgggattacaggcgcgtgccaccatgcccggctaattttttgtatttttactagagaaggggtttcaccgtgttagccaggatggtctggatctcctgacctcgtgatccgcccaccttggcctcccaaggtgctgggattacagacgtgagccactgtaccaggcctaatgttaccttttcaaaaacacctgattgtggaattgttgaagtcactgagttgtatttctggaatgtgttttttagcaggctgcacatacacatatgtagaaagccaggtgatttttttttcatttcttttttttttatcaaaaacagttgtattaaataagaaaggaaatacgtatttacccgtgtattaccttaatttatgtgtaaaatgggagaatagtttaatgtatttaacaaacaaacatttgttaaagtacctgctcaaactacctaatatatactatagtgaaagatataaggataaataagtctaactcagattgctagcctgggaaccagacatgaaaacaagaattataatgtaatataaattctagaatagatgtaaaaagtgatctaagaacatagaaaaattatcagctaatcacatgactgctcaatgggaaaagtacttcagacagaatgtaaagaatgcttggttaaagatggcattccaaatcttggaatttggttgggggacagagggaaacaaaaagaaatggggaggttaggaccaaataggaagcttcctgtatgtcatttctgataagttgaaacctaggtaggtgataggctgtctttggaagtttctaacaagaggaacaaaataagattggtgttttagaagtataccaaagcaaaactgttgcaaggagattagtaaatacaggtcttaacctagcagaggaggtagagggtagagaatgattgagatagaaattcagtagatttggccagatagtgataagttgagactggcaaattatttccacttagatttaaatagatatcttgagcataacctacaaggcaaactccttatactaaaaatattctgaatatttaaaaagaaaggattaaaagatcaatcaatagaagtttggggacagaaggtttattcattcttgtgcattagatctcatctagatcacctgtttgaagaaatcattccagcaattatcttgtctctctcctgcatggatttttttcctaatagattgttctcatcaccctaagcagttgttgtacatctctcatcttaaaaagaacagcctttcttaagtaatctcaacagtccattttcttctcttaaagcccaactcattagaattgtccctcctcttttcacttatctctttgagtactctcctgaacccagtctagtcagtcctttcagtagaactggtccccctgcttacctccctactcctcaatacacagtgaattctcaacaaagaagccgggggatccttttaaacataagacagattatgtcatttctttactcagaactattccgtggtgtgccatctcagagtagagactaaaagcccttgtcatggtgtacagattcttcatgatctggctgctttgctatttttccagtctgaccttctaatgttccccttgctctccttgctccaggcacacttgtgtctaggccaatcgacatatttgtttgtctgtttccttccactgaaatatacatgcaaaaacaaaattttgttaccgtgttccccagcaaaacaatgtctggcacctggtaggaattcattaaatagttgatggatgggcgaacggataactaaaggaacaacttcaagttccaggtatccagggtttggtaaaaggaaatctggggttttcaacaagatatcaagtattaggaagaccacgtatgctgagaaagatgatcacttttggacatgttgagtttgaaatgagtgtgaaacatcaaggtacagatgtctgatgctatatgtagtgtaaaatgtaggaacaaccctaggagaaaaatcgggcatgaggataaaggatattttcattgttaggtgataatttaagcaatggaaatgactcacattagcaagggaaagtgtctaaggaagacatccagttttggagactttttttgaggaatcaggaagaggtaaaaccagtaaaagatgaaagaggtacagtgatggtgagaattttaaaagaaggaaaatgtaaactgtcatagctattaggaaagttgagtagaatgagtttgcgtgcatcccacatgcatctgggaggtcattaacaactttattgagaacagtttctgtagagtagtgggagaaatgagagtttattgagtagagattgaggaagtgaaaatagctacattacctattgaagaaggttgactgtggagtgtaacagtgagtattagcttgaggcagagataaaggtgagtgagaaaataagagtttcaaaggtaggcaagatttttgggctaaataaaaagggcactttaaaaaaggtataaataggtagaagagagaaaagggagcgaggtgggataattgaaagaggggatctcctgtggagactgaggtattaggcggagtagagagttcaggtgaagatgtgaaggtgagagaagaggatgggtagacatttccctggtgaaggaggtaaggagtactatgatggaattagaggggacacactgagagggtccacacttgacagactctcttctattatgtgttatgtgaggtagattgtaaagtcaaaggctagccttgaaaaatgtgatattgttttggaatggcaaccatggtgaatacaaaacagttaccagaatagtatcaccatgtagcaaatgagggtctgcaacaaaggcatattcctaaatatttatatgtgtactagtcaataaacttatatattttctccccattgcagcacaactaaggaacgtcaagagatacagaatccaaattttaccgcacctggtcaagaatttctgtctaaatctcatttgtatgaacatctgactttggaaaaatcttcaagcaatttagcagtttcaggacatccattttatcaagtttctgctacaagaaatgaaaaaatgagacacttgattactacaggcagaccaaccaaagtctttgttccaccttttaaaactaaatcacattttcacagagttgaacagtgtgttaggaatattaacttggaggaaaacagacaaaagcaaaacattgatggacatggctctgatgatagtaaaaataagattaatgacaatgagattcatcagtttaacaaaaacaactccaatcaagcagtagctgtaactttcacaaagtgtgaagaagaacctttaggtattgtatgacaatttgtgtgatgaatttttgcctttcagttagatatttccgttgttaaataatgtcctgatggttttccccctttggtggtggtaattttaaagccctttttaatgttttagattttctaaatccaaagattaggtttaaattattctaatgtttctttcaaagataacttcttgtggacttgttaaaaaaaattagacacacaatctaggactgctgttactggaatatattttctatcatgctactaattttctttttaaaatgtgataaaaatagggccgggcgtggtggctcatgcctgtaatcccagaactttgggagactaaggcgggcggatcacctgaggtcaggagttcaagaccagcctggccaacatagtgaaaccctgtctctactaaaaatacaaaataaataaataaataaataaatagctgagcgtggtggcaggcacctgtaatcccagctgcttgggaggctgaggcaggagaatcgtttgaacccgggaggcagaggttgcagtgagccgagatcgcgccattgcactccagcctgggcaacaagagtgaaaaactctgtctcaaaaagagataaaaatagtaaagatattcatatttatacagctttacaagttgaaacatcctttcatttatgaagaattaaaaggggtaccctttttagagaaaaggagagcatgtaaacttcgaggaaattgatatgtataattttataaaacagggcttgcgcttttttttttttgagacagagtttcgctcttgttgcccaggctggagtgcaatggtgcaacctcggctcaccgcaacctcctcctcccgagttcaagtgattctcctgcctcagcctgctgaatagctgggattacaggcatgtgccaccacacctggctacttttgtgttttttttacttttatatattttttttttgtttagtagagacagggtttctccattttggtcaggctggtcttgaactcccgacctcagatgatctgcccgcctcagcctcccaaagtgctgggattacaggcgtgagccactgtgcctggccaggggttgtgctttttaaatttcaattttatttttgctaagtatttattctttgatagatttaattacaagtcttcagaatgccagagatatacaggatatgcgaattaagaagaaacaaaggcaacgcgtctttccacagccaggcagtctgtatcttgcaaaaacatccactctgcctcgaatctctctgaaagcagcagtaggaggccaagttccctctgcgtgttctcataaacaggtatgtgtttgtctacaatactgatggcttttatgacagagtgtaattttatttcattaactagtatctacaaatggctttgtttaaagaatgaacacattagtgcaggaatggatgaatgaaatcatcatattttctaattagcctgcagtggcagcctctggccccttgctaggcctgcctcatcctgctaaagtgatctgtgcttccaaattactacttcttttcccccttcaaatctttcttattttgtcattgtaaatgctctcagctaggtgttaaagtagtcttactgatattcaaatgtgaataactgatagccctgaaccttctatgagctatttatattttccaaagaggattctccttaagccaatattatctaggtagaattttaggcaatggagaggtgaaaataatattgatgacattaatagctaactttgagcattttctaggtgtaagatgctcttctaagcacttcacatgcattaggtatatcttgcttaatcctcacagtcaccttgaaagaaaggcactgttactttgtttccattttgcaaatgagagaactgaagcatagagagggttaagtaactgccccaaagtcacttaactagtaagtggaagtgctatgattccaaagcaaagagtctgactccagagtcaaactctgaacaaacaaaaagacactttgggttagatatcctggggtgaaagcaagcactttgaaagtaagccaagcctgtgtacagatctgaccacctgaggtcacattccctaaaatacttaaacttctcccttttgtttcccatctaagtttttgaacttaagagattttgtaaaacatcacatttttttatcctcacagtaccttcctatggcagatttagcaggaggcgtataaacggggtggaaaaggtacagcagactgtggaatgtatggatcatttatattacattaaaatttttagtttctagtaaataacttaaatgtttttgtagtgaagattctagtagttaatgaaaatttttggtaaattcagttttggtttgttataattgtttttattgtgtgatacatgtttactttaaattgtttttcttttttgtgtgtgtttattttgtgtagctgtatacgtatggcgtttctaaacattgcataaaaattaacagcaaaaatgcagagtcttttcagtttcacactgaagattattttggtaaggaaagtttatggactggaaaaggaatacagttggctgatggtggatggctcataccctccaatgatggaaaggctggaaaagaagaattttataggtactctatgcaaaaagattgtgtgttaacttttatgtattccctcatccctctttcttctcttaactgtctctcgaactaaaaagttggctagaaatcaaatttttatgcatttaattgttttaagtgcattatggttaagcattctgtagaagtcttttgaaaagtgctgtttgtcctggggtttaatgaactggattttcttgatttgggacatttttcttaggcatttataaatatagcccaatttataaagttaaatttggccgggtacagtggctcatgcctgtaatcccagcactttgggaggccgaggcgggtagatcacctgaggtcaggagttcgagaccagcctggccaacgtggcgaaaccccatctctactaaaagtacaagaactatctgggcgtggtggcaggcacctgtaatcccggctactctggaggctgaggcaggagaatcgcttgaacctgggaggcagaggttgcagtgagccaagattgagccactgcactccaggctgggcgataagagtgagactccatctcaaaaaaaaaaaaaagaaaaaagttaaatttgagggccagacatggtggctcatgcctgtaatcccagcactttgggaggctgaggtgggcagatctcttgagcacaggagtttgagaccagcctgggcaacatggtgaaaacccatctctacaaacaaattaaaaaattagcccagccaggcgcggtggctcacgcctgtagtcccaacacttcggaaggccaagatgggccaattacctgagggtcaggagttcgagaccagcctggccaacatggtgaaaccccagctctactaaaaatacaaaaattagccaggtatggtgatgcatgcccgtaatcccagctactcgggaggctgaggcaggagaatcatttgagcccagtaggtggaggttgcagtgagccaagatcacgccactgcactccagcctgggcaacagagcaagaccctatttcaaaaaaggccaggtgcggtggctcacacctataatcccagcactttgggaggttgaggtgggcagatcacctgaggtcaggaatttgaaaccagcctggccaacatggcaaaaccccatctctactaaaaatacaaaaattagctggacgtggtggcacgcgcctgcaatcccacttacttgggaggccgaggcaggaaaatcgtttgaacccgggaggcggaggttgcagtgagccaaaattgcaccactgcactgcagcctgggcaacagtgagactccatctcaagaaaaaaaaaaaaaaaaaaaaagaaagttaaatttgaaatggccttatggtagattcctcccccgacacacacttacttcatgttttctttcattatatattttaatggatacaaaatataaataaacactaaaagttaaacagaaatatttgaatatcaataatgccaaataactagaaaatctcagagctctaaaacagcaacaatttagaaactatataacctctttttattgtagtttttacagaaacataatttaaagctttttgttatcagagatatattacattatgccagtggcaaaagatgggatttatttcctcagcatccttatctttaaatttctgtacatctttccaaaatttatagctttggaaaagtgataaaactttttttcctgaattttgttttaacttttaaaaacagaaatattgtttacatcttgcgtatcttatataacaaacatctgcttatagattccagtaagaaaagttggttaaacggttgtattattttctcgtactaaatagactgcataaggtagaagttaagaatgattgccctgtagtctaagtggaaatgtggaggctttcgttagttttttctgataattcagcaaatctctattgagcacttgctatgtgccaggtactattctgggtactagggataataaaggaaaacaaaaaagtccctgccctgatgagtcatacattctatgtggaaggcatagaaaatattgaaatataagtgaattgtgtagtatgttagaagaagatacatactataaagatagataaagttggaaaggtggcagagaaagttgggcaaggagatgcgatttttaatctaataagtagttaggaaggcttcactgagtcagctacatttgataaatgacctaaagtaaaaggagggagcataggactatcctagcaaaagacccccagcctctaagaggggagcatgcttgaagtatttgaggaacaggaagttagtgcaactggagtagagtgggcaggagaagagtagtagtagatgagatacaaaaggaagacctcatagaccttcgtaagacccttaccttttactctgcacgatttttactgaataaaccactggaaggcttaaagggtaacatgatctgacttttttttgagacagtctcactctattgctcaggctggagtgcagtggtgcaatctcggctcactgcagcctccacctcccaggttcaagcgattctcctgcctcagcctcccgtgtagctgggactacaggcgcgcaccaccgtgcccggctgatttttgtgtttttagtagagacagggtttcaccatgttggccaggttggtctcaaactcctgacctcaggatccaccctcctcggcctcccaaagtgctggaattacaggtgtgagccactgtgtccagcctgatctgacttatttttgaaaaaataattctggctgtttgttgaggagaggggcaaagatggacacacagagaccacttaagctattgcagaaatacatgtgagaggtggttggttggaccagggaagtggcagtggaattggtggaaagcagttggactctggggtattttgaaagtggcactattaggagttgctcaaggattagatataaaacgtgagagaggaggagaataagaatggctgtgaagattttggccttagcagctggaaggatagagttgtatgtaactactagaattgagaagaccaaagatggagggaaatggagagtttggttttggacatttgaagcttgagatgtaatagtagacagccaagtggagatgttaggtaggcagttggatatggaagtctatacacaggtaaagtataggccaaataaatcaattcacaagtcatcggcatatagatggacttgaaggccatgaaaaagagactgagaaagagcagccagaaagttaggaataaatgcagaatggggtgttgcattccaaatgaagatggaattttagggaatagaaaatgaccagctgtggaagctgcttctaataggtaaagtaagatgaggactgagattggccgctggatttagcactgcagaagacattactaatgttattaaaaatagctcaatagattggtggagtgatatcctgattagaatgcaattaaagagcagttgaagaggaggaattggagacacagaatacagtcgattcttttgggagttgccaaaaagaagcagagagagggacattgcttggagaggaagtaggatcaaagagtcttagttttggcttgttttaaggtagaaaaaaaccgtttcttatgctgattcacattgttcagtagagagggaaaaaattgatgatgcaggagagagaggaggcatttcctgatcgttggccttgtaggcagcaaggggtaggagctagtgcacaaatggtagaagagggcaaagtgtaaggatgcagatgcttggaagagggcaaagtgtagggatacagatgctgtgagtggatagatatgagggtgggagcttatggaagttctcttttgattacttctgttgtcttagtgctaagagtatgaatgagaaaggaggagttagagatttgagaacagaggggacaggatcaaagagagcaccaagactaagaaaggcagttctcaggcgtgatttctaaaaaaatctctttcataagaaaaataatctaaaatataattatttaaaatcaaggatctcatttttcaggaacaaatatgagttgaaatcattctgttgactgttaagtggaattttttgttttgtttttatattttgagatagggtctcactcttgtccaggctggagtgcagtggcactatcatggctcactgcagcctcaacctcctgggctcaagcaatcctcccaccacagcctcctaagtagctgggaccacagatgtgagctaccactcttggctgattttttttattattttttgtagagatgtgggggtctcactatgttgcctaggctggtctcaaacttctggcctcaagcaatcctcctgcctcagcttcccaaaatgctgggagtataggcatgagccaccatgctcagcaatgaagtttttatcagtatgatactttgatacatgtcaaataattttctgaaattatattgtagatcatatgaactcataaaaacttaatgatcttgaacaatgtagtttttgtacagagaatagttgtagttgttgaattcagtatcatcctatgtggtttttatgataatattctacttttatttgttcagggctctgtgtgacactccaggtgtggatccaaagcttatttctagaatttgggtttataatcactatagatggatcatatggaaactggcagctatggaatgtgcctttcctaaggaatttgctaatagatgcctaagcccagaaagggtgcttcttcaactaaaatacaggcaagtttaaagcattacattacgtaatcatatacggcagtatggttaaggtttctgtgtagtctgtgacttccatgtcaaaatgttgcacaagccagttgtcagtgacagttgccatcccacactgctgttctcctgtcatccctagcccccatttaagagagatcacacattcatgcattgcttgcttccctctttccccaccccctccttaacctcttgatgtatgagaagaatatgagttactaatttgatccactatttggggattgctaataaagcatttttgcattttattttttgctttttaaaaataattgatattttaacaatatgaaacaatatattcctagctacaaaatttttaattctcagtatttcttagataaattcagtttttattctcagttattcagtgacttgtttaaacagtggaattctagagtcacacttcctaaaatatgcatttttgttttcacttttagatatgatacggaaattgatagaagcagaagatcggctataaaaaagataatggaaagggatgacacagctgcaaaaacacttgttctctgtgtttctgacataatttcattgagcgcaaatatatctgaaacttctagcaataaaactagtagtgcagatacccaaaaagtggccattattgaacttacagatgggtggtatgctgttaaggcccagttagatcctcccctcttagctgtcttaaagaatggcagactgacagttggtcagaagattattcttcatggagcagaactggtgggctctcctgatgcctgtacacctcttgaagccccagaatctcttatgttaaaggtaaattaatttgcactcttggtaaaaatcagtcattgattcagttaaattctagaagttttacatttaaattttaaatgcttactaaggatgctcaatttcttagatgtactgataattttagtataaaaagcatattcttcagacagttaaagtttttgtgcagtttttgggaggtccagagatctttcttgagcttaaataatgcatttccaattaaaaagcaaaataaatttgcaccatttgattttggtatctgtagcttgctgccctcttgttctcatagctttgctttgatcagatccctattccactctggattagagaattacattttagtacttttcaaatatgtaatagatacactttttatctctatgtagattttaaactacataacaggactctttgtcatattgaatggtctgcagtattgctatctgaaattaccgataatattgtacattcagattcacttaagaggtaaccttgcagagaatttacttctgtggtattctggatcactctaaagagaatgttttataaattaaacatttttaaggtaaagatatattttgtttggcattagttccatgttggattgattgctttttactgaaagcattccatcaagctgaaacagtcttttgttttatgttgcttagaacatcaagcttgcagtggctttcattttcttgtttttgtttttttttaaatcaaatcaatgcatgtgcataatttggaaactcaagtaatataagacatataaccaaaaaaaagcagttgctagcacaaccctccccatcctcattcatggtcccaagaggcaatcgtttccagtctgtttgactattttttagcttgtactgctgtcttctttctctcttcagtttagacagcaaccgttaacttcctgctatggaaaatgaggatttcattgtcttactccaacactgctacatatttctctaccctcttccccatcttccctctactaatacagcatgatttttagtgaaatctgtattcagtgtatacattataatgactgaaaaatattttttgcaatttaatacctaatcgactgtgatcacatttcctttctttacagcttactgctttccatgaagttattaactgtccttttcatttctcttaattttctgtgtccttacacaggagctataaaaatcctgcccaatatgttaaaatttctccattggttccatttctgtttcttggagaacccctggacctcttcatatgcttactccattctgaagtgctcattttctatgtgtgccatacagctctcattctgtaaattattcttacctcttttctgtgttagaaaccccatttcctggtttccatgtcatctttctagagtttttcccccaattttaagggcccacaactctcagaggcttgttgggaaaaggagcatgcaagctttttgatatcttagggtaaggttggctggatatagaattctaggttgaaataatttcttcagaatttttaagacatttcatttatcttctttagcatagctcctgctaattgcagtgcattcttttttttttttttttttttttttttttgagacaacgtctcactgtgttacataggctggagtgtttcattttgtacagatgaggtctccctgtgttgcctaggctggtcttgaacttctgggctcaaacggtcctcacgctttagcctccgagagtgctgggattacagacatgaaccactgtacctggcctgcggtgctgtttttatcttcagtcattcattatgtgctctggttttaagaagttaagattgttttgtctttatttttatttatttatttatttttgagacaaagtctcgctcttgttgcccaggctggagtgcaatggcgtgacctctgctcactgcaacctccgcctctcgggttcaagtgattctcctgtctcagcctcccgagtagctgggattacaggtacctgccaccacacccagccaaattttgtatttttagtagagacagggtttcaccatattggccaggctggtctcatcctgacctcaggtgatccacctgcctcagcctcccaaagtgttgggattacgggcatgagccaccacgcccagcctgttttgttgttatttaaatttcacagtaatgtactttggtgtctttttttttttttttttttttaacttttttttttcctttaattcttggcccagatgcttactggcacttactctagaaacacatagtccttcattgagttctggaaaattttctttaagtggttcttttataatttccctccatttttttctctagttttttctggaactcctgatgtttggacactaggcctcctatattgttcctataattttcttgtcttttctcctactttctatttgattgtctttttttattctaacttctgggatggtttttaatttttttcttctaattctttattaatatgccatgttttatagatttgtctttaaatatttttacataattttgtaacaaaatacaaaaaaagcaattcctaaaaatttagaaagtcaaatgaaagcaaagaacttaagtgtgttttcaattagagcataatcataccaagaaagtatttcaagtaacttaaaaaatgttttatgtccctagtggtatataccccaagaacaacaatagcaacaacaactataaaatgaaacaaaatcttaagctattgttagtaatcatattgctggtggtagtgttggtattcctattctgaagttatagtggatgtgaagtatgttgtatgtgtatactcttttacgtatatttgttgtatgtgagtaattatatgattatagagaacagggatctttttatcagagaaaggtgcagatgtgagattgaagtaaaagaaaacttgtggttctgcatttgtattggaaatatcattatgaactcgagatctatattatctttaaaaaatacatgctggctgggcacagtggctcacacctataatcccagcactttgagaggccaaggtgaatggatcacttgaggtcaggagttcaagaccagcctggccaacatggtgaaaccccgtctctactaaaaatataaaacttagccaggcatgatggcatgctcctgtagtcccagctactgtggaggctgaggtgggagaatcacttgaacctgggacgtagaggttgcagtgagccaaggtcgcaccactgcactccagcctgggcgacaaagtgagaccctgtctcaaagaaaaaaaaaaatatgcttattggtttcatctatcaaaaagaacaaaaaaaaaaaaaaaaggaataatccagtagtagtgagtaaccctagctctcagactgttttctaagtactgttttctcttaaaaggatgcaaggtgtcttgaagaaatggctgattccagattcagaggaggaaatatatgaatctggaaagtcttgacataccagaaaaaaactaagcatcaaacactactagtgtcatgtcaaaaggacttaggagtgtaatagaatagattcttactgatcacagataaaataatttgagcatcagaaaggataataacaggctgggcacactggcccacacctgtaatcccaagattttgggaggccgaggcaggcagatcacttggggtcaggagtttgagaccagcctggccaacatggtgaaaccccttctctactaaaaaatacaaaaattaggtaggcctgggggcgggtgtctgtaatcccagctatttgggaggctgaggcagggagaattgcttgaacccaggaagcggaggttgcagtgagccgagattgtgccactgcattctagcctgggtgacagagcgagactccatctcaaagaaaaaaaaaaggataataacagcaaaaaattgaaattcataacaaatgataacttctattctcattgttttaaaaactaaagcccaggcacagtgtctcacgcgtgtaattgcagtactttgggaggctgaggtgggcatactcaggagtatgagaccagcctgggcaacatgacaaaaccccatctctacaaaaaatacaaaaattaaccaggtgtggtggcatgtgcctatagtcccagctacttgagaggccgtggtgggaggatgacctgagcccaggaggcagaggttgcagcgagttgagatcgtgctactgcacttcagcctgggtgacagagccagagccagacccagcctcagaaaaacaacaaaaactaggtaaaaggagaaaaaaatcaagcatttatctttcttctcttatatgatctatattttgggaccctcaagtagatgaggggaagtttctgtttataaaaatgtttcaacaaataaggaataatagaattaaaatataaccatttcgcaaccctcaaattagggttgtcttttcttctaattcttttttttttttttttttttttttttttttttttttgagatggagtctcgcactgtcgcccaggctggagtgcagtggcacgatcttggctcactgcaacctctgcctcctggattcaagcgattctcctgcctcagcctcctaagtagctgggattataggcacccaccaccacacctggctaatttttttgtatttttagtagagacagggcttcactatgttggctacgctggtgttgaactcctgacctcgtgatctgcccgccttggcctcccaaagtgctgggattacaggcttgagcctgtaaatccagaaaaggattacagcccttttcttctagttcttaaagtgaatttgtgtctaccaacataattttcaagagacctttattattccctaaatgtttttcttttttttgtgacattcagttcttgtttcatagatacagtatcttctcatctttctaaagctaatgattaatgttttattttcattttcgttttttctgctccctgcattttttttttttaatgaaaacctttgtctatttgagtctctctggttagagactttcctcaatggtgatcattcactgatccagaagttgtatgtgaggtgaggcttgtcagctcatagggtagtaatgtagtgatttagtttttaactaggagaccctcaaatatcagtgactgttctgagagctgagcagagtaaggaaattaatagggagactcattgtcagtgtaagaattttatttcagtttgttgtttgttgtttgttttttgtttttttgttttttttttggttttttttgttttttttttagatggagtcttgctctgttgcccaggctagagtgcagtggtgcgatctcggctcactgcaacctccacctcccaggttcgaggaattctcctgcctcagcctcccgagtagctgggactacaggcgcctgccaccacccctggctaattttttatttttagtagagacggggtttcaccatcttggccaggctggtctccaactcctgaccttgtgatccacccgcctcggcctcccaaagtgttgggattacaggcgtgagccacagcgcccggcccagttttgttttcaataatagcatctcacccccaccctggctgcgtctgctcagtattccagagtccacgatatgtatggttcagccctccagaaaataaagtctcctgcatttttttttttaatgctgcagcaagaatagggtcctgggttcttttttagtatgagggagagacagccacctggctacttgggataggaaagaaaatctggtgtttcaactacgtttgtacaaaatgtcaaccatttcttcctattttcagccccaccatatgctcctgccttcacaggtacctgttgcctccaatttctgagtgttttcctttaattattttgtttcatgttaactccttacaacaagtttggtggctgaataaccttgggcaagttgtgtagtttctcatatactttagttttatcgttgtctgtaaaatggagatgagtcttcagattattgtgaagataatttgtttgtttgttttttggagacggaggcacgctctgtcccccaggctggagtgcagtggcacaatctcggctcactgcaccctctgcctcccaggttcaagcagttctcctgcctcagcctcccgagtagctgggattacaggcgcccaccacctcacctggctacttttttggtttttagtagagacggggtttcaccatgttggcccgggtggtctcgaactcctgacctcaggtgatacgcctgcctcggcctcccaaagtgttgggattacaggcatgagccaccttgcctggccaaagattaattgttaatatacataaagcgcttaacaccatgccaggtaccttagtaagtgttcgatgaatatttgctttttgtattagccataatcattctcaggctgctttgtcatttacttgttccacaaattcttagcttccaaaattttggtgatacctcatttcctattctctctagttgcctttgtccatgtagattttttgaggaagcttgggtaaataagtgtattttaaactattatgtttaaatcgaagttccttttatctgttttctaatagaaacatttaaatagcattaagaacttgtagcagtataaacaatatgtttgagaagtactatattgtgaaaatattttcacttttatacagttttttacttatttactgtcttactaatcttcctaagactttttaaagtgaatatttttaaggcagttctagaagaatgaaaactcttatgatatctgtaatagaattgaatacatatttaactactaaatcaatatatttattaatttgtccagatttctgctaacagtactcggcctgctcgctggtataccaaacttggattctttcctgaccctagaccttttcctctgcccttatcatcgcttttcagtgatggaggaaatgttggttgtgttgatgtaattattcaaagagcataccctatacaggtatgatgtattcttgaaacttaccatatatttctttcttttgatacaattaatttgtttgtttgtttgagatggagtttcggtctcttgcccaggctggagtgcaatggcgtgatcttggttcactgcagcctccacctcccgggttcaagtgattctcctgcctcagcctctcaagtagctgagccaccacacctggctaattttgtatttttggtagagaaggggtttcatcatgttggtcaggctgatctcgaactcctgacctcaggtgatccactaatctcagcctcccaaagttctgggattacagatgtgagccactgtgcctggcctgatacaattaacttgaatgttatatatgtgacttttttggtgtgtgtaacacattattacagtggatggagaagacatcatctggattatacatatttcgcaatgaaagagaggaagaaaaggaagcagcaaaatatgtggaggcccaacaaaagagactagaagccttattcactaaaattcaggaggaatttgaagaacatgaaggtaaaattagttatatggtacacattgttatttctaatatgagaacaaagtcttagagactttgaatttaacatttttaatgagtaaattgtttttattttgagtagtaaattgactttattttttagtatctagggtattcttttttggtgttagacaaagaatagcaacaagggacagaaatatcaggtctaagccatttgtaatatttttcctgaattcttacctatatgatgtggcttttgcatttttgtcatggtagttattagctttcatgtgttattatgcctggaactaggacctattgtggtgtcaattttaatattaaaaatcatggtgttttgatgtttatatgacataaattttattttttcgtatctcccttttgttgttgctgaagattttatgtttttctgcatttcctcatgatttatatagatgtaacatgttctataggacatgtaatttacatgtcctatagaactataagttacatgtcctatagaacttacagttctatagttatctgcagaaatattgctccttatgctttatttgcttaaaattatcactagatcatactattttcataaataaatgaatatgaaatcattcacaggcatacctcagagatactgtggatttgattctagaccaccgcaataaagcaaatattacagtagagcaaatcacacgaatattttggtttcccagagcatacaaaagtaatgtttacactatagcataatctcttaaatgtgtagtagcattgtatctaaaaaaaacaatgcacataccttaatacactttattgctaaaaaatgccaatgatcatctgagccttcagtgagttgtaatatttttgctggtggaggatctttcctcaatgttgatgcctgctgagtgatcagagtggtagttggtgaaggttggggcagttgtggcaatttcttaaaataagacaatggcatttgcaacattgattggcttttcctttcatgaaagatttctctgtagcatgcaatgctgtttgatagcattttatccatggtagaactgctttcataattggagtcaattctatcaaactctgctttatcagaatattatgtaatattctaaatcctttgttgtcatttcaacaatattcacagcaccttcgccaggactagattccctctcaagaaactactttctttgcttatccataagaagcagctctgtattaatctgttcccacactgctataaagaatacctgagactgggtaatttctaaaggaaagaagcttaattgacttacagttccacatggctgaggaggcctcaggaaacttacaatcatggcggaaggcaaaggcaaagcaagtacccttttcataaggtggcagaagagagagtgcaggggaaactgccacttgtaagccatcagatctcataagaactccctcactagcacaagaatagcatgggggaaaccacccccatgatccaatcacctcccaccaggtctctccctcaacacatggggattacaatttgagatgagatttgggtagggacacagagccaaaccatatcattctgccctggaccctcccaaatctcgtgtccttttcacatttcaaaaccaatcatgccttcctaacagtctccgaaagtcttaactaattccagcattaactcaaaagttcaagtccaaagtcttcatctgagacaagacaaatctcttccacctatgagcctgtaaaatcaaaagcaaattctttacttccaagatacaatgggggtacaggcattgggtaaatgttcccatctcaagtgggagaaattggccaaaacaaaggggccacagtccccatgcaagtccgaaacctagccaggcaatcaatgaatcttttttttttttttgagacagggtcttgctctgttgtccaggctagagtgcagtggagagatactggctcactgcaacctccgcctcctgtttcaagcaattctcatgcctcagcctcccaagtagctgggattacaggtgtgcaccaccatgcccagctaatttttgtatttttagtagagatggggtttcaccatgttggccaggctagtcttaaaactcctagcctcgctgggtggggtgtctcattcctgtaatcccagcactttgggaggctgaagtgggcagatcacaaggtcaggagttgaagaccagcctggccaacatggtgaaaccctgtttctatgaaaaattcaaaaattagctgggcgtggtggcacgcgtctgtaatcccagctattccagaggctgaggcaggagaattgcttgaatccaggaggcagagattgcagtaagccaaaatcacaccactgcactctagcctgggcaacaaagcaagactctgtctcaaaaaaataaataaaaaaaaataataaaaataactcctagcctcaagtgagccactgcacccaggccagtcattaaagctctaaaatctcctttgactccatgtctcacatccagggcatgctgatataaggggtgggctcccacggccttgggcagctctgccctttggctcttcagtctacagcccctgcagctgctttcatgggctgccattgagtgacagctgcacagtgcaggctgtcagtgggggatgatggccctcttctcacagctccactaggcagttccccactgaggactgtgggaggtggctccaaccccgtatttccctcacagtttccctcccggtttccctcctgtactgcactaacagaggttctctatgagggctctgcccccacagcagacttgtgtgtggacatcctggcacttccatacatcctctgaaatctaggcagaggctcccacagctgaactcttgtcttctacatacccacaggcccagcatcacatggaggccaccaaggcttagggcttgcaccctctcaagcaatggcctgatctgtaccttggccctttttatcaatggctggagctggagcaagtgggacacaggttgccatgtcccatggctgcacagagcagtggggccttgggcccagcccacaaaaccatttttccctcctaggcctcaaggcctgtgatagaagggtctactgtggagatctctgacatgccttggagacactgtctccattgccttggctattaacgtttgtttccttgttacttatgcaaacttctgcagctggcttgaattctttcccgggaaatggatttttcttttctacttcatggttaggctgcagattttccaaacttgcatgctctgcttcccttttaaatataggttccaatttcaaaccatctctttgtgaacatgtatgactgtgtttctagaaaaagccacatcacaccttgaacactctgctgcttagaaatttcttccacaggataccctaaatcatctctctgaagttcaacattccacggatctctagcgcaggggcaaaatgccactagtctctttgctctaaagcatagcaagagtgacctttgctccagttcccaataagatcctcatctccatctgagaccacctcaggctggacttcactggccacatcactgtcagaattttggtcaaaaccattcaacaagtctctagggagttccagactttcccacatcttcctgtcttcttctgagccctccaaactcttccaatctctgcctgttgtctagttccaaagtcacttccacattttcaggttatcggtatagcagtcccccactcctggtaacaattatctgtattagttcatcctcatactgctataaaaaatacctgagactgggtaatttgtaaaggaaaaaggtttaattgattcacagttccacatggctggggaggcctcaggaaacttacaatcatagtggaagatgaaggagaagcaagtaccttcttcacaaggtggcaggaaagagagtacagggagaactctcacttttaagccatcagatcttgtgagaactccctcactatcatggaacagcatgggagaaactgcccccgtgatccagttacctcccaccaggtccgtccctcgacacgtgaggattaccgttcaagatgagatttgggtgaggacacagagccaaatcgtatgaagctccttatcatttaagttttattgtgacattgcagtaattcagtcacatcttcaggctttacttctaattctagttctcttgctattttcaccatatatgcagttacttcctccactgaagtcttgaaccccccaaagtcatccatgagggttggaatcaacttctggtaaacttgttaatgttgatattttgacttcccatgaaacactagtgttcttaatggtatttagaatggtgaatcctttctggaaggttttcaattcactttacccatatctatcagagaaatcactatggcagctattctttataagacatgtttcttttttttttttttgagatggagtttcgcacttgttgcccaggctggagtgcaatggcgtgatcttggctcacagcaacctctgcctcccaggttcaagcaattctcctgcctcagcctccggagtagctaggattacaggcatgtgccaccacgcccggctaattttgtatttttagtagagacggggtttcaccatgttggtcaggctggtcacgaactccggacctcaggtgatccacccgcctcggcctcccaaagtgctgggattacaggtgtaagccaccgtacccggcaagacatgtttcttaaataataagacttgaaagttgaaatgactccatgatccatgggccacaaaatggatattgtgttaggagtcatgaaaataacattaatcactctatacatctctgtcagagctctgtgacagagacatgaagtgagcacatactgttgcgaaaatggcgccagtaggcttgctcaacatagtttccacaaaccttcaatttgtgtttttaaaaaaatgcagtatctatgaaactcagtgaagtgaaatacattaaaacaaatatacctatgttaactcacatattactgtaattaaactctgtatgactttttttttttttaaacatgagtacactggtttcaaaatttcctggaaaacttatagcaggccaggtgtcatgggtcacatctgtaatcccaacagtttgggagtccaaggtggtggatcacttgaggtcaggagtttgagaccagcctggccaatatggtgaaactccgtctctaccaaaaatgcaaaaattaaccgggcatgttggatgtgcctctaatcccagctactcgggaggctgaggcaggagaaccacttgaacccaggagacagaggttgcaatgagccgagatcacaccactgcactcccagattgggtgacagagtgagaccctgtctcaaaaaaaaaaaaaagaaaaaacttttagcagttatatagtttcttatctttaaatctcccttctttgggtgttttatgcttggttctttagttttagttgcttttgaatttacagtttagtgaattaataatccttttgttttcttagaaaacacaacaaaaccatatttaccatcacgtgcactaacaagacagcaagttcgtgctttgcaagatggtgcagagctttatgaagcagtgaagaatgcagcagacccagcttaccttgaggtgagagagtaagaggacatataatgaggcttgatgattattcaaggtgagaagctgttttagactctctggccatcacaggaaggagtatgttgaaatgctgcatttctcaaaagggatgtgtacatttctgggattttcagtgatgtgccagacgagtgtggtggtatgttttcaactatataccgagtagaggatgggagggttctagaattttatatattaattaaatttggtttaaaatgcaggcaaaacttgttttatttttgtccctcctgtactctgaagcaaaaaaacttttttatttttaagataaaacaaatatcttcaaagtaatggcttagtttccatgttcttagctgtttctcaagtccttcctggagtgtacttgataatcctctaccctaagggtacttgggtagaaatgtttccgaagcactaaactgttagaagtagcataggctttagaatcgtggcactctcattttattagcaaagtaaatgacaataaaatagctggccaggcgcggtggctcacgcctataatcccagcactttgggagaccgaggcagaaggatcacctgaggtcgggagttcgtgaccagcctggccaacgtggtgaaaccccgtccctattaaaaatacaaaattagccaggcgtggtgcacatgcctgtaatcccagctgttcgggaggctcaggcaggagaatcgcttgaatccaggaggcagaggttgcagtgagccaaggtcatgccattgcactccagcctaggcaacaagagcaaaactccgtctcaaaaaaaaaaaaaaaaagctattaaatgggcgtaaaatgttgttttaggatcaaataaataatctatataaaagttccatataaatgttagttactattattagaacataattttatatattaaactacctcctaaatttttagacaggtagatagctaaaaaaaaattcaaattctaagattagtttgttagggaggaaggagcaaatattttaccaaaactacttgtttttaattgattaatttcattcacttgatgacttagtaaatcttgtgaatatagccttaaatttcttaaatagtgggactacaaaataaacaatatttcatcagtaatgtaagcagtgctatactgagtagaattccctcctgttccgaaatgttacaatttgggttctccctgtgagaagtgagtccggttttaaaacctgtgagtatacttgctgcaggtctgaaaatgaaggctttatgattctttcttgaaaaattatttgcctctatcttttataatattatttgttgaagcttgtgcattctatgaatcatcatgaagatagctttaatttcatccacaaaatttaacaatatttttttgtctggacataagggggcagaataagagttggagtagggccttgcccagccactctgtaactggacaagtgatgtatttatttcttaggacctcatttccaccttctatcaagggaaaacctaagagtaggttatctttagggttctaagtgcctatgagtctatgagatttgactttattaaagttatctttgtaattctttgaggagaacgtaggcatccatttttaaaacagtcctgttagaatttgttttcagtaacaatgttgaatgatggccttttgaaatcaggttttacaacaaaattgtttaaacactgcctgcatatttagaatctctatacctatattaagatacagagattggatagtctcccttttcagtatagataatctcccttcccggtagagattaggatattaagatgtataatatcctaaagtgtagcagcagtctggtatgttacatgtctaaattccatttcctattttatttgtttattgatttatctgtttatttttgttacactgggtaagattcccaagaggtacaagtagaaatttgctaaagtgagtaggacagaagtgtagaggcaaacataaaagtatgtttagtacatatctgttttaaattgtatctactatttcaaagttaatggaattatactcctggggctaagaatgagggttctagggccaacctctactacctatgtggcttgtgcaaattagttgtcccctttgtgcctcagttttacctacaacacagaaacaatgatattacctaccccatggactgttgtgaagattaaatgaattagtacatttactacacatagatctatttctcaaaataatgagcattcagatattagccatctgtaatgtagttggtgatgattatgattattagagtacatttataattggaggatcatttttgccgtagggaaatagaattattaatagtttgaggcacctgagaatattatgtgagaaactgattacattaaccacacccttaagatgagctctaattttgttgtatttgtcctgtttaaagccatctagttacaatagatggaacttttttgttctgattgctttttattccaatatcttaaatggtcacagggttatttcagtgaagagcagttaagagccttgaataatcacaggcaaatgttgaatgataagaaacaagctcagatccagttggaaattaggaaggccatggaatctgctgaacaaaaggaacaaggtttatcaagggatgtcacaaccgtgtggaagttgcgtattgtaagctattcaaaaaaagaaaaagattcaggtaagtatgtaaatgctttgtttttatcagttttattaacttaaaaaatgaccttactaacaaaatgattataaatccagataaagtataaagttagtttatatcagagaagcaaaatccactactaatgcccacaaagagataatataaaagaggatctgtatttattttgaaacaaacatttaaatgataatcacttcttccattgcatctttctcatctttctccaaacagttatactgagtatttggcgtccatcatcagatttatattctctgttaacagaaggaaagagatacagaatttatcatcttgcaacttcaaaatctaaaagtaaatctgaaagagctaacatacagttagcagcgacaaaaaaaactcagtatcaacaactaccggtacaaacctttcattgtaatttttcagttttgataagtgcttgttagtttatggaatctccatatgttgaatttttgttttgttttctgtaggtttcagatgaaattttatttcagatttaccagccacgggagccccttcacttcagcaaatttttagatccagactttcagccatcttgttctgaggtggacctaataggatttgtcgtttctgttgtgaaaaaaacaggtaatgcacaatatagttaattttttttattgattcttttaaaaaacattgtcttttaaaatctcttatgattagttggagctaccagttggcaaatttgctagctaactagtgatctgaaagtaagcctctttgaacctctgatttttcatgaaaagcaattctctcaattctatattatttcaagggtaacaagttacatcctagtctgtgtacttaattttatagaaattgtccttaattttattttctgcaatttatgttttcttactatttctggtgtatgtgtttatcccattgtgatgttatattggtgtcctcaatttatttccttagccatacactctacttttcattgtacagggctatttattatctcagagtcaagcttttttttttttttttttttccccgagatggagtctcactctgttgcccaggctggagtgcagtggcgctatctcagcccactgcaagttctgcctcccaggttcacaccattctcctgcctcagcctcccgagtagctgggactacatatacccgccaccgagcctggccaattttttgtatttttagtagagtcggggtttcaccgtgttaaccaggatagtctaaatctcctgacctcgtgatctaccagcctcggcctcccaaagtgctgggattacaggcgtgagccaccgtgcctggccagagtcaagcttttattttattgaatatatggtcttactaagttcaatagcatgaatctgttgtgaagaattcaagaattttcttctatttgttgagttttgttttcttaggagttttgctctttctcttttgctgtgttttctccttattttttaaatgtgtttgtgtttggtgagttatgttttagtgcttcgtaggtttttctttgactatattatattagtaagccacattgttcccatgccattttatttcatcttggtcatatttggatgactcttttcacacattttattgttattatagaaggtggataacttttgttcatttaattcatcaatatttatttaatgactgttatgtgctagacagtgttttaagtgctgggtacatagcgattaacaaaacagataagaatccctaccctcatagagcttacattatgaggttgggggagggagattacaaacaaagaaataagtaatatacatgtgtatagtttttttagtgctcagaaaaaaaattaagtgggtaagggggtaatgtcagagaagagagagggatgtaattttagattgagaggtgaggagagagacctccctggaaagctgacatttgagtgaagcttgaaggaattgagggagtgaggtgaggcatgtggccatctggggaaagctttccaggcaattacaaaggccgcagtacagcaggatcatgcctagtgtgccgtgaagcattggcagagaccagagagtgagaagtaacatccagggacagaggcagtgaagagccaggtcgtgtgggggtccttgtgtggactgtaacttcctgtgatgacaggaagtcacaggaaaattccaggtagagggacactgtctgacaggttttcacagaatcattcaggccactgtgttgagaataggctgtagggggcacaagagtacaaacaagccatttggaggctctttcaagcacttaggcaaaagatgatgaaccaaacaaaagcaatggaagtggtgagaagcagtcagattcttgttgtattttgaaggtagggggacggtgcaggatggtctgaacattgggaaaaatggaattgccacttagaaggaaagactgcaagaaaagcaagtatgtggggaagttcaggagctcagttttagacagttaagttttagatgcttattaggcatctaagtagaaatgtctacttgatggttacataggaatctgttcagaggaatggctggatatgaatttgggagtctttactacaaatttttttgtatttttagtagagacggggtttcaccgtgttagccagaatggtctcgatctcctgacctcgtgatccacccaccttggcctcccaaagtgctgggattacaggcatgagccactgcacccggccagtcatacaggggacatttaaagccgtgagactggatgaggtcactgtgggcatgggagtagatagagacgggaagagatccaagacctgattgaagccttttatacttagaagcagggaaatataaatgtaaatataggaatcagtaaaagaaacagaggaatggccagagaggttggaggaatactggagtgaggtatgctgaaagccaagagaaaaaaagaattgtcgagtagtgagagtgattaagtctgccaaatgctatttcatagaattgataatgaagtgaggaccaagaattgatcattggctttaacaccgtggaggagcactttcagtggactgaagtggggcaaaggaaatggagggaaaggaggaatgatagtgaatataggcatttcaaggatttttgctttaagagaagaagagaaatgaatcagtagccagaaggggaatcaggatcaagagaacatttgctttttcagttgaaagtgctaatagcatactgatgagatactgtatgctgatgagaaagatccaataaagaaggtaaaatgcaagatggaagcaaaacaggaacagctgtggggcactgttctcagatactgtgtggtatggtatctagaggctctgttgaaattggccttagctagcaggagagactgttcatctgtaatcacaggaaaaaagtaaagtacgtaggtatagataccaatggaagagttgatatacaagaggaaacttgtggcagacctcttttgattgctctatttcctcgctgaaacagggcacaaaatcatcagctgagagtcagaatgaagaaaagggggccaggcgcggtggctaacgcctgtaatccagcactttgggaggccaaggtgggtggatcacgaggtcaggagatggagacaatcctggataacacggtgaaaccccgtctctactaaaaatacaaaaaattagccgggtgtggtggcgggcgcctgcagtctcagctactcgggaggcagaggcaggagaatggcgtgaacctgggaggtggagcttgcagtgagctgagatcacaccactgcactccagactgggagattccgtctcaaaaaagaaaaagagaaagaaaagggtgttgaaggtttgagagaagaggaaaggcatgaaatcattatctaagaaagtggtagagtaaatggactaagtaaacacatcatgactgccagggcccactggaggtttaatgttcatgaatatattgttgttgtgtgatattttttcaaccgtgttcagctctgatggtgtgggcatgaagtagttggaaagtagaatttaaccaggtctgtagtttagctgggtaagtaatgcaaagcaagaagggcaaagaatttgggggtatatgcaaaaggaggatttaaataattgaccttggacacaatgcagagcaaagaagagacattagaagacgtggatcaatgaacaggagataagaaaagctgattgtaggtcacggtgggtttgagttagggttttagagggagtgaactgggcagatcaaaggtaggtggttgaagaaggaggtacttcaaattgagattctgggggaaatggagttattggaaataaaagtcttgggtatgtccattgcagtgagttaccagtggaaaatagaggacatgatcatttaggaagaaaacaaggaacttgggagcaacagagtattggaaggattgcctgtgaggatactgaaatttccaggaaacatgaccatcgtgatgacagaatgacagtgagttatgagttaaaatcttcaaggaatgaaaggcaatgagtgagccagggtcaatggatgcctgtagcaaggaacagtaatgaatgacagtctgataacacgaggttcaaaactgagtgtttttagagtgggaggagcagcaatgaagcatgaggaagacatctgcctcatctcagcctccagtagcacaaggtctgcaggggcaactgtacaggcagacaagaaccaggtttgttgcaacaagatggcaatgagagcacctgcaggaaagggtgacggtagtggagatcttactgagttccagaggccccattgaaaggattcgaggagatgaagaggtaggaggagatggtgcccagaaaggccacatccaaagcctggaagcggaatccagggaatttggcatgactgagagcctgtgctgccttttttaaatgttttaatttttgtgtgtttatagcaggtgtatatatttatgggggagcctgtgcttgttatggggactgacacagatcagctcttggccccaaggcaaggtgtgtgggagaagaaaaagtgaggaggcctagatgtcagaggagtccggctaaaccactgcagaactgctgcctaattcacagcaaccatgagtaaaaatgctgatgatcatcaggtcaaggatagtctggagcagttaagatgttactttacatgggaggtatcaattaaagatgatgaaatgcctgatttggaaaacagagtcttggaccagattgggtttctagactaaatacagtgtgggaatacacaatacacaacctactagcctatgtgaaacacccgaaaggccagaatgaggaagtgctggagaacttgaaagaagctgaagacttaatccagaaagaagatgccaatcagatttgagaagcctggtaacctggggcaactttgcctgggtgtattaccacatgggcagactggcagaaacccagacttacctggacaaggtagagaacatttgcaagaagttttcaagtcctttctgtcacagaatggaatgtccagagatggactgtgaggaagaacgggccttgctggaatgtggagggaagaattatgaacaggccaaggcctgctttgaaaaggatctggcagtggctgctgaaaaccctgaactcaacactgggtatgaaatcaccgcctgtcgcctggatggctttaaattagcaacgggggatcacaagtcattttctttgcctaccctaaggcaggctgtcaggctaaatgtagatgatagatatagtaaggttcttcttgccctgaagctttgggatgaaggacaggaagctgaaggagaaaagtactttgaaggagctctggccaatacgtccatgcagacctttgtctttggatatgtctttggatatgtcttctcttcttactgaagagaagactttgtggatgaagctcttgagctcttaaaaacctccttgcaggcaactcccacttctgccttcctgcatcaccatatagggctttgtgacaggacacaaaagatccaaatgaaggaagctaccaacaagcagcctagagggcagaacagagaaaaggtagacaaaatgataagatcacctgtatttcatcttcaatctgctgtggaacaaaagcccacatttgaggttgcctatatagaactggcaggaaagtatatagaagcaggcaatcacagaaaagctgaagacacttttcaaaaagtgttgtgcatgaaaccagtggtagaagaaataatgcaagacatatatttgcactatggtagatttcaggaatttcaaaagaaatctgatgtcagtgcaattatccgttatttaaaagcaataaaaatagaaaaaggcataattttcaagggataaaagtgtcaattctttggagaaactggttttaaggaaacttcagagaaatgcgttagacctggaaagcttaagcctccttaggtttctgtacaaattgaaaggaaacatgaatgaagctctagagtactgtgagtgggccctgagactggctgctgagttttagaactctgtgggacagggtccttaggcactcaaatattgaccactttcatatttcatttgattttctgttaacgtgctaatcaaggctgaggtgagtggatcacctgaggtcaggagttcaaaaccagtctggccaaagttgcgaaaccgcttctctactaaaaatacaaaaattagccaggggtggtggcacacacctgtaatcccagctactcaggaggctgaggcaggagaattgcttgaacctgggaagcggaggttgcagtgaaatgagatcgcaccactgcactccagcctgggccacagaacgagactgcatctcaaaataaagaaaaaatgataatcatcttttctgcttgctgttttcagaaacatattatgtaattcactgtaatgatgtaattattgaacagttactcaaatctgataaaatattagttgcattcaataattaatgaatcaatgtgtgtgtgcatgtaagaaaaaccatttgtatgaagcagaaaaaaaatgttaggtagatttgtaggaaacaaaatactggacttacactaaaataaagtgagaaggtcggtgccatgacccagtgtaattcttgactctctatttatccaagattaatttctcccccccttagttacagtgtgagggctggatatttgagtttctattcatgatacagtatgtatccctggaagatgtctctggttctagatcatttttcccagttcagtgagtaacgccgtgtatttatttgctataacaaagaaccatagactgggggcttaaacaacagaaatttgttttctcacagttctggaggctggaaatccaagatcaaagtgttggcagggttaattccttctgaggctgtgagaatctgttcattgcctctctctttgcttctggtgatttgctggcattttttggcattctttggcttgtagatgtctcacctccacctttgcttcattgtaaggtggtggtctcccaatgtacatgtctgtgtctaaatttccccatatattaggacaccagtcattatattagagcctgcccatatgtgtgggtggaggattacccaggtgccgaggcaagagactgaaggcacaaactatttcagtataataaagaaaatagttagattaaggatagtcataatacaaattagatatagagatgatcatggacaattagcaatcattataaaccttaatcattagcttttagtattattctttgctgcattactaatataacctaggaataactggcgggtatagggtgaggtgctgaagggacattgtgagaagtgacctagaaggcaagaggtgagccttctgtcacgcccgcataagggccacttgagggctccttggtcaagcggtaacggcagtgtctgggaagacacccgttacttagcagaccgcaaaagggagtctcatttccttggaggagtcagggaacactctgctccaccagcttcttgtggaagcctggatattacgcaggcctgcccgcagtcatccggaggcctaaatcccctccctgtggtgctgtgcttcagtggtcacactccttgtccacttttatgcttctcccgtactcttggttcctctttgaagttcgtagtagatagcggtagaaggaatagtgaaagtcttgaagtctttgatctttcttataagtgcagagaagaaaacgctgacgtatgctgccttccctctctgtttcggctacctaaaaggaaagggccccctatcctgtaatcacgtgaattgcttcaccttttcaatcacttagaagattcaccctccttaccatgcccccttgtcttgtatgcaataaatatcagcaagcccagccgttcgggccgctaccggtctcccgcgtcttgatggtagtggtcccctgggtccagctgttttctctttatctctttgtcttgtgtctttatttcttacaatctcttgtctccgcacacgagaacacccgctaagccgcatagggctggaccctacacatatgacctcatctttttttttttttttgagttagggtctcactctgttgcccaggctggagtgcagtggtgtgatctcagctcactgcagcctctgcctccccagctcaagcaattattgtgccttagcctcccgagtagctgggacgacaggcacgtgccaccacacacggctaattttttgtattttaatagagctggggtttcaccatgttgcccagggtggtcttgaactcctgagctcaggcattctgcttgcctcagcatcacaaagtgctgggattataggcttgagccactatgcccagcgtgtcttaggatttttcaactttataatggtctgaaaacaaaacatgagtaccttacaactattctttttcacttccagtacagtatgcaataaattacatgagatattcaacacttttttttttaaaaacaggccttgcgttagatgattttgctcaactgtaggctaatataagtgttctgaacacatttaagataggctaggctaacctctatgctcagtaggttaaatgtattaaatgcattttctttttttttttttgagattgaaagtcacatttattgccacgtgaaggaaagccaattaagtcaaattgattaatgtttgcagagtatatctgtttcgatccttttgtttttaatctacctttgtcgaatttaaagtgagtttcctataaggaacaaatagtcgggttataaatttttatccactctttcaatctctgtccattgattggatatttacatcacttacaatgaaggtaattattgatatgccagcattcaactttgtcattttattatttgttttctatttgtttctcctgcttttcattcctccatttctcttttcttgccttcctgaaggttacttaaatatattttaggattccatcttgatttatttttagtgttttcaggcatttttgtattatttttgtagttgtttctctaggtgttacaacatacatgtatgacttacagcagtctactagtatcaatattctaccactctaagtgaagtgtgagaattttgctttcattttgattttggagggaaagggattggatagtgaccatatacagacctttttcttccctacttttaaatactattttcttggatatcatagtattattatttttgttttagtcatcaaacataatttataaactgcatgaggaaatgatagcttatcgtatatgtccatttctcaaactctttccattgtttcttcctccatcctattgtcctcagtcctgatgctctgagagtcttcctttaatcttctcttttctgtttaaacaatttcttttaggcaatttttgagttagagaaaattcttttagttttctctcatctcagaatattttatttctcctttattccttgagaattgtttcaggatatagaatttgtagttgataattctttctttcagtacttgaaaaatattgtgccacttccctctggcctctggttttagatgagaaatctgtcatcattccaattgatgtgtccctatttaaatgcattttcaactaacaacgggtttattgtgacataaccccatcataagttgtcctcgactgtgtttccagataaggctgcattcacaggtactgggaattagtcacaatgtatcctgtaacatcctggaacctttccttatgtcagtcagtcctggtcacctgtttggtccctggcagttttttctcatttctgttcagaagaagaaaaaggtaaagattcttcagatttaggaataacagaattctcaaaaatgtcattttaccagtttagttggggaaggagattagactctgagccttcctgtgcttagttctatccataatcttctgtttcttaatcaccagattttaaattttatatcatgatattccacgtttgtagattttgggtgaatgtttcctttttaaaatttaatttgtttttaagtgttaaagttctattagaaagtttcaaggagccaccttaaaccagaagtctttaacacccagatctagtcatgatgcctcccagcttaaaatcttcagtggtcccctgtcccttagaaaatgaaacccagactcttttgtatacccccaaaaccattcaacttcctgccttaaaccaccaccatacacacgtcagctaaactctaattttaggctgggcgcagtagctaatgcttgtaatcccaggactttgggaggctgaggcggctcgcaaggctaggagtttgggacaagtctgggcaacagtgagattctgtctctataaacataaaaactaaatttaaaaaaaaaactactttaaaacataataataaaacaaactgtacaagttcatattcctgatgcatgataacatttaatgcttcctacctttaaaaatcttctttgttttgcatagatgctcttttgttctccccctcttgatgaatttgtcctattcattattcagctcaagtattacctccctagtcagatgcttacagtctgggttagatcctccttcctccagcttttgaagcattttgttggtttggctgtttcagcacttgtcacatggtccatgatcctacctgtacacttctgaataagccacctactagcctcagtaatacaatgatctcttcaaggacagggactctgtttggatttctacttccacttctgacataatgggttgaagcaggggtcagttgttgaaaactccaggtatgcagcatctcatacggtcctcatagtcacactgttcatttgctattatcatcccactttacagatggggaaactggagctcagagaggttaagtagcctgctcagggtcacaatgctataaattgatttgaacttatactttcaggccctaaagctcttaggttctttcttatacttcatgctgacaaaacaaaagcaaactcaacatttgagagttgggcttaaaacagggacatctgtatttttaatctaatgctttgttactgtattacagaaacactgtgatatataatgagttaattaaacgagaacctttcttaggttgggaaagatttgttttggggaaagcctgtttccctgggaaacagacttacagatttcatgtaggagattagaaaatgcccttaggaacagcacttgtgaggaagcaaatgcagcaggattgggcagaagaagaagaaaggttcagttagtcccacagggacttctggagctgggtggcccttcagagtcttgctagcctgaggcaagagccagtccttgcatactggctcctccagggaggggcatagccttaagcaagacaatgcctttcgacagagggcaagtccaggagggaactcagaggtgagttgtcaatagctagctctccccagaagctggaggatcacatgccttggtcctgaaggggatctgcacccgcaccatggcatccactccaggtggaatcggtgacagtggttttataaattgctaagtcctttattgtttcagtgacattttctaaaaggaattaaaagctttgaagaattctatgcaagttcagagtaggccagaccacaaagctgcaaaataagtttcttcttttccttttgtcttgtgaagatttacctagtgtaggattctaaaagtgttacactaaaaattcttccagttgttatcagttgtatgataattaaagaaataaggcttccatttcttttgatggaatttgatccagacatggaaacctccacttacgtaaaagtgcaatgaggaaactacactgtttactttttatttttctgtattctaaatgtttttcaataaacatgtattttatatttggggaaaacaagatatatttaaaaaggacatttgggagaaggacagtactatcatcaagttttgaatataattagaggcaagttccaaaattagaaaatggaacatgcttgagaaacttataatttctttaaaagcagtgtttaaaattaagatccattaaataaatttgaaatgaaaagaaagaaaagatgaaccatcatttgcaatagaataaacaaatccttatctgagaatgacatttccattccctgttatttacaacggatacataattctcagagtaacaaaaacaataaagtataaagagtagaattaaatgcttagtgcctcttccaactccagctttcctagcctcagttctatcctggtttatcccaggatagaatggatagcacctacccatctttcactttagaattttataactcttggctaggcacagtggctcatgcctgtaatcccagcactttgggaggccaaagcaggcagatcacttgaggccaggagttcaagaccagcctggccaacatggcttgaacccgggaggcgggggctgcggtgacccaagattgcaccactgcaccctagcctaggccacagagtgagactgcgtctcaaaaaaaaaaaaaaaaaattataactctttattttgaactaatttcagacctttaaacaagttgcaaaaatcgtggaatttccaaatattcctcacctagcttcccctaatgttaacatcttgcataaccgtagtacaattagaatcagaaagttaatagtggtataattattacccatactgtagatgtatttgaaaaattgtttgagtttaaggtattttaccctgtttccccttttttgttctgggatcccaaattgcatttagtcatttttcccctgtattttctaccagtctttaatacttcctgtcttctttttcatgatcattatgcttttgaatagactgataatgatcattatgtttttgaatagactgatcaattattttgtagcattcccctcaatttgagttcgtctgatgttttctcatgactaggatgaagttatgcatttctggcaagactaccactgaagtgatgatgtgtctttctcagtacatcatatcaaggggttaatgatactgatcttaatcacttgattaaggtgataatctgctgggtttctcctctgtacaataacttcctttttctttgtagttaataaatatcttgagggagattctttgagactgaatcctatttcacatcaaactagcattcatcagttgattttgtttgcaacaatgattactgtggtatttgcctaattatgatttttctccctttctttccttctacattaattggaattctataaggaaaagctgtgccctttccaccaatgtatttatttggttatttatatcagtatggactcaagaacatttattttattctgcaggttaaaatttggtaccttcattattttattgtttaactttttttttttagctttgaccattaggagctttctcatatggactcgtgtgttctttcaaccagctttcttcactttttgaacacttccttattttttgacatcacaagatgttccaagttcatcttatatgttccctgccctagtcttggaatcagccatttctcttggcttcttttttttagtagaaaatggtgtttagatccaagatctggttgctagataggctcattactttactgtggaggcatcagtactgccaggccctctcagcagacagaggtgggaaatgtttgtcttccattttggattccctcatgtctagttggatttgtttgttggttggtttattgggtatgtgaagtatcactgtggttctagggagtcagacctgtacaaaaagatatacttcatgtcacttcctccttatccttgcagtcccaatcctaatcctcctttttcccccactcacaccctgttcctttagtttctgagtttatccttcctgatttcttttgctcaaatgaacagatacatgtgtattttcttatattcccttcttccttataagaaggggaacatactctagcctttcttttatgcttttcttttttaactcaacactgtcctggagatcagttcatagaaatcgtcctcactctttttttacagctacgtggtacaccattgtttggatgtaccacagtttatccaactctatcctgtatatgagctaataaaagttgcttccaatattttataattataatgtttcagtgagtaaccttgttcataggtgttttcatgaactttatgttcatgtgtattttactattattagaggtctatcttcagagaggagtacaagaaatgggattactgggtgcaaaggtaaatggatatgtgtctttgctaggtattgccaaatttatctccagaaatcttgcacaaatctgtactcctgttagcaatgtgtgcgtatacctgcttccacatgacctcagtaaaagaatgtgttgtcatattggtattgaaattttagcactgtaagcaacaggtcattttggaaaacctgagctttcgccaaattcagctattttgatttgcttttattattagcatataccaaaataaataggcatattagagtttcctttcttgcatcttaaaattcatctaacacatctataataacattcttttcttttttttccattctaggacttgcccctttcgtctatttgtcagacgaatgttacaatttactggcaataaagttttggatagaccttaatgaggacattattaagcctcatatgttaattgctgcaagcaacctccagtggcgaccagaatccaaatcaggccttcttactttatttgctggagatttttctgtgttttctgctagtccaaaagagggccactttcaagagacattcaacaaaatgaaaaatactgttgaggtaaggttacttttcagcatcaccacacattttggtatttttctattttgacagtccagtatcaaggaaatagcttttatacaaattggatagttgaggtagtatgtgaggtaaagtttaatcatatattaattgcccatgaacctcaggagatgggggaatggggaaatgacagcaactagaaagagaagaatgacttgaagggaaatgagttaggagaaattgtgagaaggatgttcagaaatgcagactttgtaagcaaactggaaattggttacaagaataatatgagttatctgtggtttgcagcagtcagcagtgtgattagttaataatatagagactacaggtttacatttaaactccatatctagtgttttatacagattatatttctttgacttgatttaatcccagataagagacactgatattattttccctagatcatgtatgcattttctgcttaaatctatatatacattatataatattagctggtgtttattgagtgtttactatgtgtcagaccttgttctaagcttctcatttaattctcccacaaccttatgaggtagggaactgtttttctattttatcagtgagaaacaggttaaatggcttgccttaggtcaaatgccaagttagtaaaactaggattcatacttaggccatcgaatgcagaacccagactaggaactgctatgcaatgctgcttcccagtaaaatttgagatttcatgagttggtaactagtgaagaatacacaaaaaataagcctcttaattctgtagtttaatatttgaaatgtgtgttattcagaatttatataaaaatatattttaaaagcattagagtagctgtataaagaaagctgtgttgacattttacctagagactctatgcataatgaataacactctgctatatctagtttctaaattaggggtgggagttgtattcattatttagttcccatacagcatatctactgtttacaccccacattttctttttttctttctttcttttttttttttttttttttttttttttagagacagagtcttgctttgtcacccccaggctggagtacaatagcacaatctcggatcactgcagtgtctgcctcctgggctcaagcgattctcgtgccttagcctcccaagtagctgggactacaggtgcgtgccaccacgcccagctaatttttgtatttttagtagagacatggtttcaccatgttgggcagtctggtctcgaactcttggcctcaagtgatctgcccaccttggcctccccaagtactgggtttacaggcatgagccaccgagcccgcattttctctgagacgtcttcaaaggcagtttactaatcctgctgaagagacaactgtcatttacacagcattttaaagttttacaaaatactgtcatgaattaggttaaaccatatgaaattgctgatatttgaccagttgtgatttctcaagcaacagtttcatgtagtttaacctataaatcatttcaattaattcttggaacagacgtgaggtaggtgaggcaattctttcttttctctaaccaaagaagtacctttatagatgtgagatgattcccagctattaagtagtaaatagagctaggacttgagccccaatcttccagcttcaatccagatcatatgacagcttgctgattaaactagatgacagagaagatctctttccttcagatacacatactttttctctgttcccctctccctatcagctagattcccctaaatcactgatactggttttgtaattttgcatcggcatgtttgacaattggtatcacatttagggtttttcattcttttttggtccaaacttttcatttctgcttttaaaggaaatacttttggaaacataaatatgtgggtttgcaatttataaagcagcttttccacttattttcttagaatattgacatactttgcaatgaagcagaaaacaagcttatgcatatactgcatgcaaatgatcccaagtggtccaccccaactaaagactgtacttcagggccgtacactgctcaaatcattcctggtacaggaaacaagcttctggtaagttaatgtaaactcaaggaatattataagaagtatatatggaggccatcgtatattctgttgtatacctagtaaacatggtaaaatgtaattaaacttaattagaaaatgtggttgttatgtggctcctgtaagtatagttatttagaaattttatttattgaagcaagatatgaaactctgggtgcacactttccaaacaggtgctttcatttacatgtgattgaaaagtgttttttgtcatttatttcactgttccatacaattagggttgtttctaagctgtttgtaagctgtttctaagctatttaagtggttaaatcacagtagatgcaaatcaagctaaagtctttaacattggctaatggctgattcttaaatagctaatacttgctaagggtatctatattaactcatttaatcctcataacaaccctatgagataaaacctaagtcctcacttaacattgtcaataggtttttggaaactgattttaagggaagtgatgtataacaaaaccatttttttttctcatcactgttctaacaaaatgatgttgaagatttaaatgacattgctcaaagacctgctatacattgtttgacttaaagtcacagtttccgagaacctatcaattatgttaagtgaggacttgactctattatcctgattttgtagatgaggagactgtggcatagagagaggttaagcaattgcctaataaggtcacaaagctagaaaagtaggtattagaacccagatagtgtgtgttctcaagatggctttaaaatatttatctttgtttaatctgttaataataaaaaacaaaagattaaagcataagtgacgtcccctacctccttttttatcttttactgtgattattcttcatcttccttccttttcatgtcattttatatgttcttatgtaaaattactttcatctagaataggaataatgtgaactgaaatcacctaacctattaggagttaggggagggagactgtgtgtaatatttgcgtgcttaaatattttcaatgaaaagttactttgatttagttttttatgttactacataattatgataggctacgttttcatttttttatcagatgtcttctcctaattgtgagatatattatcaaagtcctttatcactttgtatggccaaaaggaagtctgtttccacacctgtctcagcccagatgacttcaaagtcttgtaaaggggagaaagagattgatgaccaaaagaactgcaaaaagagaagagccttggatttcttgagtagactgcctttacctccacctgttagtcccatttgtacatttgtttctccggctgcacagaaggcatttcagccaccaaggagttgtggcaccaaatacgaaacacccataaagaaaaaagaactgaattctcctcagatgactccatttaaaaaattcaatgaaatttctcttttggaaagtaattcaatagctgacgaagaacttgcattgataaatacccaagctcttttgtctggttcaacaggagaaaaacaatttatatctgtcagtgaatccactaggactgctcccaccagttcagaagattatctcagactgaaacgacgttgtactacatctctgatcaaagaacaggagagttcccaggccagtacggaagaatgtgagaaaaataagcaggacacaattacaactaaaaaatatatctaagcatttgcaaaggcgacaataaattattgacgcttaacctttccagtttataagactggaatataatttcaaaccacacattagtacttatgttgcacaatgagaaaagaaattagtttcaaatttacctcagcgtttgtgtatcgggcaaaaatcgttttgcccgattccgtattggtatacttttgcttcagttgcatatcttaaaactaaatgtaatttattaactaatcaagaaaaacatctttggctgagctcggtggctcatgcctgtaatcccaacactttgagaagctgaggtgggaggagtgcttgaggccaggagttcaagaccagcctgggcaacatagggagacccccatctttacaaagaaaaaaaaaaggggaaaagaaaatcttttaaatctttggatttgatcactacaagtattattttacaagtgaaataaacataccattttcttttagattgtgtcattaaatggaatgaggtctcttagtacagttattttgatgcagataattccttttagtttagctactattttaggggattttttttagaggtaactcactatgaaatagttctccttaatgcaaatatgttggttctgctatagttccatcctgttcaaaagtcaggatgaatatgaagagtggtgtttccttttgagcaattcttcatccttaagtcagcatgattataagaaaaatagaaccctcagtgtaactctaattcctttttactattccagtgtgatctctgaaattaaattacttcaactaaaaattcaaatactttaaatcagaagatttcatagttaatttattttttttttcaacaaaatggtcatccaaactcaaacttgagaaaatatcttgctttcaaattggcactgattctgcctgctttatttttagcgctatcacaggacccagagcctatgcccttttaaacttaccacaaaagcagaagattaattcaatttaagatgatactctcatttgttacgtcctttttttttttttttggagatggagtcttgctttgtcgcccatgctggagtgcagtggcatgatcctggctcactgcagcctccacttcccgggttcacgtaattctcccacctcaagcctccctagtagctgggattacagggacgcaccaccatgcccagctaatttttgcatttttagtagagactgggttttaccatgttggccaagctggtctcaaactcctgatgtcaggtgatccatctgcctcagcctcccaaagtgctgggattataggcgtgagccactgtgcccggccaatatttgttactttcttaggtttaatagagaaaagggataaaacatttctaactgggagttaattgcatggagaaggtcttaaatcagatgttttaatgccttaaatgtctgtataatatcatgttttcaaatctaattataaatacgtttaaagccaagaataaatcttttaaaaaattga

SEQ ID NO: 7 - DNA, 184390 bp, Homo sapiens
  source 1..184390: mol_type = genomic DNA; note = BRIP1_gene
aggcgggaattcgtctcgggttgtgtggttgaggggtctggtgggtcgaggaaaggtaacggcggccccagtcctgcacacaaggccggggaagtagcagcacccccaggaagagggaggaggaagggctcgtgccctttcttctcttccagggctccgctttatttgctctcagaagtcggtttcctttccttttcttcagtgaatcggagctcagagcgttgcttcggtttccctccagacaggcaagtcggagggaagtccacggaaagggcttgagttcttctgcacagcctgcgggcccatgggtggtgactggatcaccagggtctcggggatctcaactggctgggggaggagggagatacggggcagaaaacctgaggagggagcctatccttacctcctttgagcgcaggcctgttcttagcccgggcgctgcgttaattcttggcgggaggcagaggggtgtgtttatcctttatgcaatgtttgggggaagctaccccattttgacactattgttgccacagccggggtacaggacgggctgatttctagattatatctgagtaactaggccagcgttgagttgttgattcatattaagaggttagattccaccatacctcattctcagagctttacagatagaatcgcaaaatgttagagctggaaaataccctagaataatggttcttcttttggagcacacaagcagtggtgaatgttattattggcttcataatctattgaattgctattttaaccatctcttcgtccccaggttgaatttacaattttttcccacgactgcaaataattccttatttaataacagtgcatgtaatttcccccgctattttgatttccttgagatatatttacgggaagagaaatctatggactttttcttcagaaaaatgcaatcatgtacagaaacttatgcttgcaatttcaagaggtcattgtctctgaattacatccgtggatcctaggttaagaaaagtggtttagaagaggtgaggattaaagtgatcctcatctgtatcagatcctgggttaggtacattctgccctggctaattttcataaaaaccctgtcaggtaagtagtagtatttcaattccatatatggagaaacaagctctgagaagttaagtgattcacacagtggaattcaaacttaggattgccttactccaaagcccatcctgtttctataatactctactgatcttcaaataacatttttgagtgcctactatgtgccaaggcattctctttcttataacagcctttaaattaaattaggggttatcacaggtaaggatcttagactagagaagtaaaaagatatgtcaaagataacatacctgagtcaaagataacataccaggcagtataccaaaacctggtatagaacctatgcttcctgacttctggtcaacagcttttttcttctaactggaggactgcagaaaggggtaacacaaaggggaagaactggagaaagagtgatgctacggagttgtagagagagaggcctcaggaacttatttgtttctgtaggttgattacatctgatctaactgttacaagagctcatgtttaatctggtatgtactttatcatatttgcacattatttcacttaatcattaccacaatcctatggggtacatgcagtcactgtggcttagagaaggtaactaactttcccgaagtcacacaactaatacctggcagagtgaaggatacaaatctagatttgttagactctaagacatgctcttgaccgctgtgatttataagactaggaaattattttgtttccatttgttttgtttatacttttattaattccagtttctgtttccagatttctcccttagttttggttctctggttttctttgtaaggcgtgtctcaatatttgacattttcatttctgttgtagttaggaatctgaaataaacaggaaagcactatgtcttcaatgtggtctgaatatacaattggtggggtgaagatttactttccttataaagcttacccgtcacagcttgctatgatgaattctgtaagtatttttcagcagttaagtttttattaagatatagatacttatgacccataaagtacattgagtatttgactgcattcatattctcagtaaatggagaatattttctgggttcacttggaagaatatctaacctctgggaaactactgattgcagctaaactgtatatatctgtggttaaggcaaagaagaacattctgaaaaatgttctcagctcatttggaatttctatacttttaatgaaaaactgctatacttttaagtaaaaacagagtatttactatcttttacacagaatactatttttctcaccattgttttgtttggatcatgtagaaaattaatatacaaatttgagtaaaccagctttccagttttgttacagctattttgccatatgtacttcatatcttatttactggtaacaagattattagtatcctgaatttgttcttttcctttcctagccatgtttttatacttttattacatatatatgtatccataaacaatatagaatattattttacatatttgaaactgtgcattgatgtgatacggtaccttactttttatgcagaacttgagttttttaacttagcattatttttaatgtatagccctgttgattcttaatccattttaattgttgtataaattccattggatgaatataccagaatttatctgtccattttcttattggtagacatttaggttgtttacattcttttgcagttacaaacaatgctgctgtgaacttccttttttctttttgtttttgagacagcgtctcactctgtcgcccagattggagtgcagtggcgcgatcttggctcactgcaacccctgcctcccaggctgaagctattctcctgcctcagcctccccagtagctgggattacagggatgcgccaccacgcccagctaatttttggatttttagtagagacgggttttcaccgtgttggccaggctggtctcgaactcctgacctcaaatgatccacctgccttggcctcccaaagtgatgggattacaagcgtggctgctgctgtgaactttcttatgcatgtttccttgtgttcatgtgggaaaggttttgggtgtacacatagaactggacttgctggagctgggcatcttcactttataagaaattgtttatttctctaccaagtagttgtaacaatttgtactctcactagcagtatccttcattaagttttcatcaaatatattgataggtagtaatgtattctggttttacagaaatcattgatgcttgcataattctggcacagattcctcttttcatttcttctcttgtgcttgatattttagtaagataatcttagggagaggtgtaaaggaatacagtttggatttaactaaatatgagttccttctgctattgttgtgttccctggagtgcaatctcacttttccttgctgttctatttaaacttcagatggagagagacctttataaagttaatatgtttattattttcattggtttctgtgttcatagattctcagaggattaaacagcaagcaacattgtttgttggagagtcccacaggaagtggaaaaagcttagccttactttgttctgctttagcatggcaacaatctcttagtggtaagtagttgcttgatatcttcaggttacttactgggatctgagaaaatataatacagtattctttatccagactggttcagccatgctgtcgctaacttaaatatttgtttaaagatgtttctttgaaataagttataaatcttccaaaagagtttcaatatagcaaaatatgtttaattaatgctaaaatagtattgaacataatttagtcttttgatgagtcggaaagtacataaagacttggcagcctgggcagcatggtgataccccatctctacaaaaattgacaatcaattagccaggcatggtgatgtacacttgtagtcccagctacttgggagactgaggtggtaggatcgcttgagcccaggaggtcgaggttgcagagagctgtgattgtgcactccagcctgggtgaaagaaaacaaacaaacaaagttttggatgcttagagttattataaaaataattagatgataatttgtatgtaaaagatgcaagagatgggctgtcatgatgctgtaacacatactaattgctttttttggggggggaaatcctttaatatatttgcttacctgttcctttctcataacatcagcacatggaatatataaaaaagaatacattctagttgatctttctacttgtttaaatgccagataaacagaaatttagtataatattgtttgtatgaatttatattacttcccactacttttcctttttttttttttttttttgagtggcgtcacctgggatggagcatagtgatgtgatcatagctcactgtaacctcaaactcccaggctcaagtgattctcctgcttcagcctcttaaatagttgggattataggcatgagccaccaggccaaactatttttactttgtttgctaacaaatgcctattaatatttacttctatgaaagactatataaactacataatgaatcagaaatataatattggatacattttagttacattagatggctttaacctaaagtattaggagaattgaggttaaacatggtatgtgtatgtatgtatgtatgtgtatataggtatatagatacatttttaaaatgaaatgtttgttactaataagagtatattaaggctgggcacagtggcgcacgcctgtaatcccagcactttgggaggccaaggcaggtggatcacctgaggttggaagtttgagaccagccagaccaacgtggagaaaccccgtctctactaaaaatacaaaattagcctggtgaggtggcgtgtgcctgtaatcccagctactcgagaggctgagacaggagaatcacttgaacctgggaggtggaggttgcagtgagccgagatcgcgccattgcacttcagcctgggcaacaggagcgaaactctgtctcaaaaaaaaaaaaaaacagtaaatacttcataagcttttggttgttcattttgattctcactgacgttaattttgggaaaaatgagtttatcggtactaacttcaggtcttaatggcagatgtctggaaaatagaattaggaatatttatatggtacaaatgggaaaacaatgtcaatactgattatttttaaaaataaattatttagcttttttgggggtatatgaattgtacatttgtatacaatgtaggcacacaatgtaaacttattacaatttggtattatatttagcactaaaattacctattttattgatttgaatattgaccttaaaatgtattttgatgcaagtatcagaattaatacatcaaaaaacatgtttctatttgaaatagaagtataattgggggaatgatttaacccttatgtgttagattattatctaatatattgaactttcaaattcttcatttagggaaagagtagtaattaaggatatactttatgtccttgtttcaatccattcttgaattttagataaatcttaatataaatgaatacttgagtagttgtacttttattacattattaatcttagattattagatttttacagattacataaatgggtgataatttccctataaatgtttttgttttggtttttgaaacagagtcttgctctgtcgcctaggctggagtgcagtggcatgacctctgctcattgctacctctgcctcccaggttcaagcgattctcctgcctcagcctcctgagtaggtggtattacaggcgtgcactaccacgcctggctaatttttgtatttttagtagagacagggttttaccatattggccaggctggtctcaaactcctgacttcaattgatgtgcctgcctcggcctcccaaagtgctaggataacaggcgtgagccactgtgtccaaccaaatgtttttggcttatttctctcctgtcctaatttgatgctgcagataaagtgaccagcttgtccaggtttgccaggtaccttcctggtgttagccctaaaaatcttttatcttaggaaacctcccaatcctgggtgaactgggctgtagagaatgattgatgtttatttaattagatatattataaatagatgttctttcatttttagggaaaccagcagatgagggcgtaagtgaaaaagctgaagtacaattgtcatgttgttgtgcatgccattcaaaggattttacaaacaatgacatgaaccaaggaacttcacgtcatttcaactatccaagcacaccaccttctgaaagaaatggcacttcatcaacttgtcaaggtaatttatattttgcctgggtcagttgatatctgtaataagagtcttaattattactgttataagccctaatttatataagtttggttagcataactgattatatatctctatctagtttctctggaatgattttaaaatagcacagagtggtcaaaaatccatagacgtttttaaattcttggtttgacttttaatttattgagacattttgttgtcctaaataattttttaaggaaggcaaggcaaaataaatgattttccaaaattgatgttatttgtagccattattgttaattatatgttagaattctataaaacaatgtttgtatcctaagacgaaatctaattagcctcattgattcattcttgataagtttgcctggccttctgaggccagtatcctacataagtatcaggtatgtttatgtgtgatctttaaataatttttactaattttagagaaatacattaagagtaacataagattattaataatatatttaaaaaatatttcacctgcttttggctgtatagaaaggatagactattatttacctaagaaacctagggaacatcctggacactttgctctttcttatttcttcatgtacatctccatatccattggtacctccatagtccaaactaccatttcttgtttagagcatccaataacgcttttttctgcttttactcatgctattcctttaccagtcactggcagggagacagaggttgccatgattgacttaagtcaaaacaaagagtatccatttcctaaaatcaaggatggagtcagcttcctctaaagcatgtgactatatagaggagggtagatgattgaacttctggtaggaatgaggaaagagaagtggaacagttattaaataggtgaccaatagtgttgtctacattgttttgattttggccttttggatttcttccctttccttcaaagatttatgctttctccttcctcagagcctttgcttctattagtgtctcttctgagcaaagttccatcttcaatttattatccttttcttcctcagtttacatgtgacttccttggggtatccatcactgatttttctgtcagagtagatttgattttcctattatagtctgtcttctccttgtgtacctttcctttatagcacttgttacagtttgtattatatgtgtctgtctaaatcttttattaatctctgcttccttggcagactacttcatgaggttaggaatattgtcaatttgcttaccattgtatccctagaactctagcagggtgcctggcatatggtaggtgctagataaatatttgttgttaggaatgaatgggattaattttcagctaattataggaattctggtgtataatatttatatacaaccttttaaaaacagctttattgacgtttacttgacataacaaattgcatatatttaaatggtactttttttttttttttttttgagacagaatctcactctgttgcccaggctggagtgcagtggtgtgaccttggcccactgcaaccttcacctcctgggttcgagcaattatcctgcctcagcctcccaagtaattgggatgacaggcgcctgccaccacacccagctaattttttgtatttttagtagggacaggattttaccatgttggccaggctggtctcgaactcctgacctcaagttactcacctgcctcggcctcccagagtcctgggattataggcgtgagcgaccacgcccagcctaaatggtacactttgatacattttgacatatgtacctccatgaaactttcaccagaatcaagacagtgaacatacacaccaaccccatattcactttatccaaaactttttaaacatgctcactttcccaaaaagttttctcatggacttttgttatccctctttcccacccctacatgactcacctccccaaccaaccacctgtctgatttttgttactatagattagtttgcattttctatagtttatataaatggattcatacaggatgtatacttattttgtctggcttctttcacttatgacaattattttgagattcctctatgttgttgcatgtattaatagtttgtttctttttatttctgagtaattgtgcatggatataccacaaattggttattggctgtttatgtatatttgggttattgctagttctgggctattacaaagacagatactgtgaacatttgtgtctacatctttgtatggatgtatgttttcatttctcttgggtgaatactaggagcagaatgaccagattgctttgtaggtgtgtatgttttaacttttttttttttttttttttttgagacggagtcactcttgcccaggctggagtgcagtggcgcaatctcagctcactgcaacctctgcctctcgggttcaagtgattctcctgcctcagcctcccaagtagctaggattacaggaatgtgccaccacacctggctaatttttgtatttttagtagagatggggtttcaccacgttggtcaggctgctctgtagctcctgacgtcaagtgatccacccatctgtgcctcacaaagtgttaggattacaggcgtgagccaccgtgcctggccaactttttaagaaatttctaaactgtttcatgaagtggtcataccattttatattcccatcagcagttatgagagttccagtttcttcacatccttgtgaacccttggtatggtcagtccttttaattttagccattcttttttcctggagatagggtttcattctgttgcccaggctgggtacagtactgtgatcttggctcacttggctcattgcaacccctgcctcctggaaccaagtgatcctcacacttcacactccctagtagttgagactactggcatgcaccaccacacctagctaatttttatagtttttgttggttttactgtgttccccaggcttgtcttgaacccctgggctcaagtgatctgccttcttcggcctcccaaagcactgggattataggcatgagccaccatacctggccttaattttagctactctaataggcatgtggcagtatctcattgtggttttaatttttatttcccatattttcatgttcttattagctatccatgtatcttgtttgatgatatgtctgttcgaataattgcctattttttattagtttgtgttcttactgttaaattttgagacttctttaaacattttgaatacaagtctttgatcagatagaattttaggtttacatttaggtctaagatccattttgagttaatatgtgtatatggtgtaaggtatggattcaagttcatttttttgcatgtggatatccagttgttcagcacctggatatatcgaaaaggctatcctttatccactacattgcctttgtgtctttatcaacaatgagttatccatatgtacacaacttgattttgacattactgtgagtcagtgttatttagaatagtctaaatgggaaaaatcaaggttgtattctgatacgctctttatatttgtaagtaaatcctttaatctgtaacctaaatatagaaaaatgcaaatcctaagtatataacttgatgaattttcactgtcataactactacatagattaaaaaaaaaagagagagacattaccaacaccccagaggccctcctcatcttctttttcagtcactgtcccttctttccataggtaattcttgtcctcctgtgaccattgatgagttttgcctttttacagaaatagagtgaaactccatctcaaaaaaaaaaaatggaattatatatgtaatcttgtgtctgtcttctgcttaatattgtatttgtgagattcattcatgctgttgcatatagtagtacttcttgtttctgtgtattatttccttgtatgaatataccacagtttattaatctgttctacagttgttaggcattgggttgttttcagtattgtttaatagtgctgttatgaacattcttgttcaaagggtgcaaataggtaagtattgtctgtagacacatacctggtcatagtatatacatatgttcagctatagtagatactgacaacattttctaaagtggttgaatcaatttatgcgtccccggtcagatccctccaacccctgcagcagtatatgaaagttgttcaccatttttgttagtacttgatatttatagtttaaaaaaaaagttagtcattcttgtgtatgtgtggtattctcattgggttttagttagtatttctctggtgacttcatatgtttattggtcatttggataccctctttagtgaattgcctaatcaagttgtttgccatttttcttttgttttttatttgaggtggggtctcactctgtcgctcaggctagagtgcagtggtgcgatctcaactcactgcactggccagctcccaggctcaagcaattctcctgcttcaacctcctgagtagctgggattacaggcacctgccaccacgcccggctgatttttgtatttttagtagaaatggggtttcaccatgttggccaggctgatctctaactcctgacctcaaatgatcactcgcctcagcctcccaaagtgcttgaattacaagtgtgagccaccgtgcccagcctccatttttctattgggtatttcttaggtttcttgaagattttaaaaaaacataatcgggagatatcttctttctttttaactttgtatcttaaagattttacccctttgatgaacttccttcaaactcccttgctatcaagaccaggaagataagcctttttgtatgtgatgataatatgatttttatttttatgaattggggttacccttatttggcacatggcagttcagttttctaaaactaaatgatcattttgggtggacattccctaccctcttaataggcccatgtcagtttgccccgtatttatttgggacagagtttctccacagtggcactattaacattttgagtgggataactctttgttgtaggagctctcccttgtgagatgtttagcaatacttctggcctttatgcactggatgctagtagtatttccacctctgctctttttgtgacaacgaaaaatgtctccagacattgcccagtatgcctgggatgagaagtggtggtgttaaaattggcctggttgagaatcactgatctaggtttattttgtggttattttactggttgcctggacatgcagagctcaaaattacctatcttatctaaaatatatatggaaatgcaaaggactaaggatagccaggatgcttttgaagaagcaggtcaaggtgagagatttgatccaccaaatatacggatttattgtgtgtaaatatagagtaattaagacagactgaggttagcacagtgatagactcatataaaagtatagagaaccctaatttggtcccacatgtatccagaaacttgatatttttatagaagtgcccctacagcttgtaggggaaaggaagaacttgggtggtgctaggcctgttagatgtccatatggaaaaaattgaaattggagccctactttataccatatacaaaagcccattcaaggtagattaaagacctacttctgataggcaaaactattaggatttttagagtatagtggttttcaaactgtgtttctaagaaccttataaagaaagaaacatgactcataagggaagggggaaagtggatcagggaagttctgggtctttcatccctattttggaaattttaagcaacatttctttttttttctttttttgagatggagtctcgttctgtcacctaggctggagtgcagtggtgcgatcttggctcactgcaacctctgcctcccgggttcaagtgattctcctgcctcagcctcccaagtagctgggattacaggcatgcaccaccatgcccagctaatttttgtatttttagtagagatgggctttcgtcacgttggccaggctggtctcaaactcctggcctcaggtgatccacctgcctcggcctcccaaagtgctgggattacaggtgtgagccaccgtgcccagctgcaacatttctttaagaagaaaatattcctacactttagaaaaaacttgaaaatcagtgctatgtggcataggttcatttctgagtttatgtaatctcaagctttcttttttttttggagacatagagtcttgttctgttgcccaggctggagtgcatggcgcgatctcagctcactgcaacctctgcctcccaggttcaagagattctcatgcctcaacctcccgagtagctgggattataggcctgcaccaacatgcacagctaattttcgtatttttaatagagatgggatttcgccatgttgcccaggcaggtcttgaactcctgggctcaagtgatccactcgcctcggccttccaaagtgctgggattaaaggcgtgagccactggggccggcctcaaatttgtgttttgaaaacagtattggacctgctcatgtaggtctttctctgctgtaaatcctttagggccaaggattctctttttcactgtttttccatggtgtctggccatgggttagactcagtgtaataaatgattgttggctgggcacggtggctcacgcctgtaatcccagcactttgggaggctaggcgggtggatcacctgaggtcaggagttcgagaccagcctgaccaacatggagaaaccccgtctctattaaaaatacaaaattagccaggcgtggtggcacatgcctgtaatcccagctactcaggaggctgaggcaggagaatcgcttgaacctgggaggtagaggttgtggtgagctgagatcacaccattgcacttcagcctgggcaacaagaggaaaactccatctcaaaaaaaaaaaaaaagatggttaaaaaagattgttaaattaattcaagccatgggagtggagagaatgcttagagagaagcaaagaggaaggagggtacctttaagaatatttatatttaggaaaagggagaaaccaatgtatgagaatagttaagagcagtgttacagacattaaggaagaagaaaatgtgtttgctgtgttccaagaagacagtgttggctgtatgcctaagaggttacatgtatggatgttggagtcacacagcaggattcagtcatgtctaggctctaccatttaataactgtatgatactgggcaagctactagacttttaaaaacctagtgttcacatttgtaagattgggataattaatgttatttggtgattaagaggtcctggatgaccttgagaaggagctttcaggattatgggattaaaagacagattatatgagcttgattctataatcaatggttttgctctaaagaacgtggagaaacttagtagggaagaaacgttgatactgtaaagaaagatttttacagacatgaaatatattttcttcagagatccttgcagttatacattttaaatcatgttattgggagtagtctacaagtacataaggcgatttaaaaaatcaaattggacttttcctattgaaagcatgtttctcagaatctttggtaaagtaaactgaatggtagagaagtactttttaaacatgtttaagtttcatgttttagattatggtatgaaatttctagaaataagccttacatcctggttccagttttcttctagaaaaattgcctacctgtaagttatttatgctgttttttttaaattacttatataagactcccctgaaaaaaccactctggctgcaaagttatctgctaagaaacaggcatccatatacagagatgaaaatgatgattttcaagtagagaagaaaagaattcgacccttagaaactacacagcaggtaaacagagtttattggcagtaaataacccagttagttacagctgaacatggtagtcaagtatcatgtttttaatgcacttgtggagattagttgggtcatgtgacagccataaattaataatttgttgtaatttcattttgtagagttacttgttacaaaggagtttattatagcagattattcacagtaacatgtcgttcaagtgaaactgcatggtgtttcttatatatgaggaatttgatagtaaaatatttacttaaggcatatcttagtgatatactactttgtactttttaactcctccattgtttttatcttaaaatagcatttccttttggctaaaatacctttgatatgattattcatgttatggatattttggaattgatagttttaatgtaatgacaagatgtattcttactgagtttttaagattgatacatgataaaatatgtatatttatttctaaaaattactaaaaggcttgaattaccagatattttaaatgaaatttggatgcagatgaacacaatattttctcagaattcatggcagtgagataggaaggctgggattttaatagatttagttacaaataaaaaagataattattaggctgaatacagtggctcacgactgtaatcccagcactctgggaggctgaggtgggaggatctcttgagtccagcagtttgagaccagcctgggtgacatagcaaggctcctgtctccacaaaaaagtaaaaaaaaagaccgggtgtggtggcatgagccctacaggctcatcagacatgtagccctacagactactttccagctacttgggaggctgagataggaggattgctcaagcctaggagttgaaggctgtggtgagctaagatcatgcaattatgcttcaaccttggtgacagagcaagaccctgtctctaaaaaataaataaataaaaacataaaataaaaaaattattaattaggatgttatttgtaggtaagtaactgggtacttttaattgagtatactcaaggttcttgaagtcttatgtagtttaactgttccacttacagtctttataaatttctataattcagccttgtttttagaaatagaatgaactagtttattttatcaaagtaccaatgacaaatgaggtgtgaacctatagagatttccccccgacaaaatgtattcatagatttgcatgtcatcaggtagggctcaacataaaacatttattccctcacttcactggttctcatttcatttttggcgggaatgagattatcaatagaaatgcttttctccccaattatatagtgaatagatttttcacaaataggaaaagcatggatacagtttggaaagaaaacttagtggtatttataaaagaaatttaatcaaaggcaacttggtttatcaaatatctagtaagtaacagtgataatagtaatcgagtaatttattccatcctgtaggaaatcatgactgtttacattaaaagttttattctgagttcttttcaatgtagaattatgcttaaattttgatttacttttattttccaattagatataagattggactttccaatattgctatatttgatgtccatatgatgggactattttatgagaagttcattttacaatactctaattttgatacatcactaattaaagatagtttggctaagattcatgagtcactactatgttctatttcctttaagtgttgtaatgaggtgcttatttgcatttttaaaatttcttttattattgcctgttagaaatagtctttttttggatgcaggaaaaaaatacatagagctgttttggcctttgagaacaactagccagttaaacttctagttcaccttaaacttcattttggttctgtgtttacagattagaaaacgtcattgctttggaacagaagtacacaatttggatgcaaaagttgattcaggaaagactgtaaaactcaactctccactggaaaagataaactccttttcgccacagaaagtatgtattaatgccattgttcagttttaaagaaggaagatatggaattttctaaaccaatttttgacaaaagaggaacaatagtataatacaaaggacagtagcaacccactcagaagtcctcaatgctgtcacatctctgttactaatgtgtgagatggcaaagcctattctctctatgcctcgtttccttatttataaaataagagaattggactagagagagatctgaaagtcatttttttctgttctgtattttaatgtttgtaaattctccaactccttacagttctttcaggattcttagggcaacagttctcaaggagtagtccaaggagttctagatattgagatttttttggggagtgatctgtgaggtgaaaattatttttgtaataatattaagatgttgtaggccaggcgtggtggctcacgcctgtaatcccagcactttgggaggccaaggcgggtggatcacttgagttcacgagtttgaaaccagcctgggcaacatggcgaaaccctgattctacaaaaaatacaaaaattagccgggtgttgtggtgcacacttgtagtcccagctacttgggaggctgaggtgggaggatggcttgagcccaggaggcaaaggtgcactgagccaagattgcaccacactgcactccagcctggatgacagagtgagaccccgtctcaaaaaaaaaaaggaaaaaatacattattgccttttggattgtcttgacatttgtactggtggcgcaaaagcaagaatgggtaaaactgttggtgccttagcagaaatcaaggtattggctccaacctctctctctctctctttctctctctctctctttttctctctctctctctctatatgtatataattttttaaatttatttattttaatttttttttgagacggagtatcgctctgtcacccaggctggaagtgcggtggcgtgatctccgcccactgcaagctccgcctcctgggttcatgccattctcctgcctcaacctcccgagtagttgggactacaggcgcctgccaccacgcctggctaattttttgtatttttagtagagacggggtttcaccacgttagccaggatggtctcgatcttctgacctcgtgatccgcccaccttggcctcaacccaacctatgttaataatagttttccagcatcattagatcacagttttgaaaaaaaaccagtttcatttaagaatgtctttgatgaagcagtaaaaattactaattttatttaatctcagccgtttaggtttttaacattctgtctgaagaaatgaatagaactcataaaacacttttgcatacagaagcaggatggatgtcctggggagaagcgcctgtaggatagtttggattgtgagctgactagccactttttgtcatggaacatcatttttgcttgaaaaagagtgaatgatatactaaccatggtaattctttatgataaaatgagccagataaaatttgagctttcaagtgaaaatcagaattttaaaaaatttgtatatactctgagcttggcagctttgtgataactacagacttttctgatgaaattggtgatattacagaatatgactttttatatttatataatgaaatgtgtcaacatttgtaagatctgtaaaactcaatgaacttaaactcagcgaactaaatattatttaaatgaccagtgcatgatattgcaaaatgatgcctagaaaaggtccatcctaagtgcaagatagactgatggaccttttttctgccctgtccccccattcccaggcaaccacagatttgttttcagttactgtacatttaatttgtgttttgttggtgatcttcactgaagctttatattaatagttggagaaattatgtagaagcttcttctgttaaattgcaataatcatcaacatcattataatgtaagctatatgttgagctctgccacagtgttttctcattcattttctttcctttccttcatgggcttactattatctgaaattacttgattacttgtttattatttgtctgtcctattacgatgtaatgtcagtctttttcatgtgtgtccctcatgcctagaatagcatatggtgcatattagttgtctaataaatatttatttgttgaatgttactgagttcttacaatgattatgaagcaggtatattggtattcccatcgtacagatgaggaaactctgagaaggaagaaactggcctaagatcacaaagctagtaaatagtagagctaaatcctgcctaggcattctcatgttctggcaaatgccctaatcactttattttatattctctctaaaatgcctctttgcagtcctggagccacctaaatagggttctaacaccaagataaggaaagaaatatgtagaagctcacagataaacaaatcaagtatagagtcacctgtgattaagatttttttttcttgggaattgtttttgtttgctttatttgtagacacagggtctcaatgtgttgcccatgttgtaacgcagtggtgtgatcatagcccactgtaacctcaaaatcccaggctcaagtgatcctccaaccccagcctcctgaatagcaaggactacagctgtgcaacaccatgcccagctaattttttatttttattttttgtagagatgaggtctcactgtgttgcccaggttggtctcaaactcatggcctccagtgatcctcttgcctgggcctcccagagttttgggattataggcatgaatcactgcacctggcttgttttgtttttattggttaagagaatggactttggacacatactgcctgatcttaatttttaaataaagattgggccaggcatcatggctcatgcctataatctcagcactttgggaggccaaggtgagaggattgcttgaggtcaggagttcaagaccaacctgggcaacataacgagaccctgtctttataaagaatagaagaaaaaaaatagctgtgtgtggtggtgtgtacttgtagtcctagctactcaggaggctgagggagggggatcccttgagccagaagattgaggctgtattgaactatgattgaaccactgtactccagtctgggtgacagagcgagaccctgtctctaaaaaaaaataaaaaataaatacataaaataaaaattatatatattttaggtgtaaaacatgatgttttaatatatatatacatagtgaaattattactacagccaagctgtgatagtctgtttgaattgttataaagcaataccagaggctgggcaatttataaagaaaagaggtttattttcactcacagttctgtaggctgtgcaggaagcatggtgtcagcatctgcttctggtgagggcctcaagaagcttacaagcatgccagaagacaaagagagagcaaacttgtcacatggaaagagaggacagaggagagagcagaggaggttccacactgttttaaataaccagatctcgtgtgacctcagagcaagaactcaactcattactgtgaggagggcaccagccattgatgacccaagcactttacactaggccccacctccaacttgggggatcacatttcagcatgagagttggaggggacacacttccaaatcatatcacaagctaattaatatattcatctccttacatagttaccttttgtgtgtgtgtgtgtgttgagaacacctgaaaattttaaagccaatatcgaaatatccagcctagaatatagtattattaactgttgtcatgatgctgttcattagatctctagacttgattcatcctatgtagattcaactttttactctttgatcaacatctcctcaaatcccccacctccctgccccagtaaccattgttctgatttctgtttctatgtatttgacttttttagattccacgtataagtgagatcatgtagtatttttccttctacatctgacatatttcactttgcataatgtcctccctccaggttcatccatgttgtcacaaatagcaggatcttttttagggctaatattccattgacatacacatacacaccacattttctttattcatccattgacagacacttaggttattttcatatcttgagactgcttggattttaatcatagctctactctttattaactgtataaccttgattttttaaactcttggtattatgtttagctatttgttaaatggggttagtaatagtacctatctcacggggccgttaggaggattaaacaagttgatatctatacagtgctgagagtatctggcataccttagagtttaagcgccaagtggtagtagaagtagcagcagctgtagtagtagtaacagcagcagatggatacatatttgtagttcttacctttagctgctgctgataaaagattctatataataccgactaataatattacatatttgtagttctgatctttattttttgtttatttttgttgacacataataattatacatacttatgggattcagtgtgataattttcatacatgtatatgatgtgtaatgatcaaatcagagtaattaacatatccatcgcctcaaacatttgtcatttctttgtgttgcgaatattcagaattctctcttacagctttttgaaaatatgtaagaaattattgttaaccatatttaccctagagtgctatagaataccagaacttattcctcctgtttctccaatctagctgtagttatgaatttgtaaacccacctctccttatcctcccctcccctcaccccttcctaacctctgataaccacaatttactctacttctatgagctcattttttttagctcctacatatgagtaagaacatacagtacttacctgcctatgcctgacttatttcacttaatatcttccaggcttacccatgttgctgcaaataacaaggtttcaatatttttctatggctgaataatattccattgtgtatatgtgtcacattttctttatccattcatctgttgatggacatttaggttgatgccaactccttgtctattatgaatagcgctgcaataaacatggtgttggctgggtgtggtggctcacaccagtaatcccaacactttggaaggctcaggtaggagaatcactcaggccaggagtttgagaccagccccggcaacatagcgagaaccccatctgtacaaaatttttaaaaaaattagccaggcgtggtggtacgtgcctgcagtcctagctacttgggaggctgaggcatgggcgatcacttgactctaggagtttcagactgtggtgagatatgatcatgctactgtactctagattttctttcctttggataaatagtagtaggattgctggattatatgattatatggtagtaatatttttaggtttttgagaagcctccattgctgttttccgtaatgtctgtactaatttacatttccactaatagtatatgagtttcttctccacatcgtcactaacatttgttatttttttttgtcttttcgatagtaagccattctaactgagtgagatgatatcttattgtgcttttgatttatatttccctgatgattagtgatgttcagcattttttcatgttcttgttggctttatgtatcttttgagaaatgtttattcacaccctttgcctattttaaaatcagatttttttttttttgctgttgagttccttgtatattctggatagtagtcccttctcagatgaatagtttggaaatattttctcccattctacaggttgtctctatactctgttgtttcctttgctgtgcagaagctttttagtttgatactgtcctatttgtctatttttgtttttgttgcctgtacttttgaattcttacccataaaatctgcctagatcagtgtcctgaagcttttgccctatgttttcttctagtagtcttatagttttgggtcttatgtttaagtctttaatctattttgagttggtttttgtagatggtgagagggatctagttttttccttttgcatatggacatccagtgttctcagcaccatttattgaagagggagtcctttccccgatatgtgttcttggcatctttgttgaaaatcagtcaactgtaaatacctggatttacttctcggttctctattctgttccattggtctatgtgtctatttttatactaataccattctgttttggttactatagctttgtgtagtacatagcgtggtgcctacagttttctttttgcatactattactttggctattcagggtctttgtggttccatatgaatcttaggattgttctttctattcctgtaaagaatgttattggtattttgatagggattacattgaatctgtaggttgcttggagtaatatgtagttcttattttcattttatttatttggttaacttttttagagacaaggtttcgctatgttgcctaagctgctctcaaactcctgggcttaagcgatccacctgccttggcctcccaaaatgccaggattataggtgtgagctactgcacctggccttgtagttcttatttttaaatgctgctgaaagctattattaatgttattgttgataatactgatcaacattataaattttgaggagttaggtttagagtttagtagaaaattccttttcttttttttttttttttttttgagacggagtctcccctgtcacccaggatggagtgcagtgggcgatctcggctcactgcaacttctgcctcctgggttcaagtgattctcctaaatcagcctcttgagtagcttctcaagtagcacctgacaccacgcccagctcatttttgtatttttagtaaagatgaggcttcaccatgttggccaggctggccttgaacgcctgacctcgggtgatctgtttgcctcggcctcccaaagtgctgggattacaggcgtgagccacggaacctggccaaaaattcttttgatatctgttgaagatgtttatggctgaaatcttttgagtctaaaccgcttgaccataagcacatctactgtgcccttggttgagtaccttaattttaagcctaatgctttgattgatttctccttttggttatgtagtatgctgatatatgttgatcattgattatggtctgctcattggtaaaatatagctgtatctataattgtatatctgtatctttatatctgttttatttttaagctagaaattgcatattttcttccttggctttaggtggtataactctacatatctctagaaatggaataatttttcataagtgggtgatttattactcataacattaagatataggcctctgacaatttctcataagtctgaaaacttcttgaacaagttaaatctctcaattaaatctagtccctcaaatgataacatttcactagtgtgacactgaatttttgtttgcaagaagatgtaagagatatatgtcatactaattaaacatgcataaagtaaatttaacagacatcaaagcacttttgcaatgcaaagaacatatggttgagctctaatatttgtttcttttcatggtagtctatgatgaaaaacatgacgtataaagtaattttatgtgctttctgaaaggttatgggaaaaaaaaacccaaaaatacataggtaaaatgatttgtattttcaactttatttttttcttcctaacataaaaataggataagtacttataatagaaatataattattataaaatgtatagttttagtgagcatgaatgtttctcctttttgtatgttaagtaaatttttagtaaatttctcatggatttctagcattaaataatacatctaggttttcagagaacaaggactaattatttccaagaatgtaatataagaaaaaataatggggatatgagtagaggtaatttatttaaaaaatgggatttttgggtgtcataggggagtaaatatttttccttgtaggaaattactttggtttctgctgtaacatttcttagtctttgcaaagtgacttattataaatcataaaagtattttctgtagattttgggataggtggtttcatgaaaagtagaagaaaaatagtttcatgtgtattaatgtcgtaagttttaatatttattatacagcagcttttgaaatgagtttattgccaaaacttttggataaagtaattgaaaaaaaagtagtccatatattagaacttttcttatgctgacagatcatatgcctcacttttttttatatttttttatttttgcttttttcttcagaccaaaatgcctcacattttatctgttgtattttaatctagaccttgtaataatcttgaataaggtaaattgatagacttgggtaagtaacttttttgtgaaaaccagttccttcatatggaaggaaaaagaatgggagactagatttaatgatgctttatttatttatttatttatttatttatttatttatttatttattttttgagagggagtctcgctctgtcgcccaggctggagtgcagtggcgcgatcggctcactgcaagttccgcctcctgggttcacaccgttctcctgcctcagcctcccaagtagctgggactacaggcgcccgtcaccacacccagctaattttttatattttagtagagacagggtttcaccgtgttagccaggatggtggctcactcctataatcccagcactttgggaggctgaggcgggcggatcacgaggtcaggagatacgttatatctaattgaattctaacacctttaaattctaaggacgcttttcctatcttgctttttattatatgatactagggagtacagtattttttaaatagaaatatttatttggattcataaattaatggtttaattctcatccctgcaaaggtgtgtcttagtcttcacgtttttcaaatctgcagttgcattacttttgacaaaccttcttccataaattaaatggtaaattagtttgatgatttctgttttcccctgaatttgacattaaactttttaggttcttcaaattttcttagtttttatgaaaatcatttagtttccacctagtggattggagaagtagattgttgtctctttatttttctatcatttctagtctcctaactctcttttcaagtcggaagatagtgtcagtaccttttcttatataattaactttctggtgtcccctgcttgatccctttccttacagttcagatttattttcttaatctgacaattcatatgtcaaagttctagtgaagcatctgtctccacatggtcaaaatatagttaagaaaaacattgttttttagaatagtatgttaacgttttgatattactttgttctatcattcataatcattttctctagatttatttatattctgttctttttttagtaaatcctcacaatagccagggttgtcttcagatatattcttatgcttatacctgctttttatttattcattaaataaatgctaacattctttatatactttaattaaagtaattatatttgatttaatgtagcagtagcatattattttaattcataacttgggcctggtgtgtggaagacacttgggtccagcagagtgcgctgttgaccttcttacaaagtgttaacactggggcgatccttaggctatttttcttcctttttcttcctcccataccccatttttatttccttccttcctacccttctttcttttactttatggttttaatttacttttatttaaaatagctatttaacataactgcatatatatgctgatactggtgcttactgtgttatgtgccagacactctgctaagcactttagaaatattaattcacctggcaaatacaggttcatgtgagttgatgcttattgtcatgttcttttaacttttctttgggtttgacagttttcaaaataaaagaatttaactcaatctttataacaaccgtatcaggaaggtattaatattttccgcaattatagctgaggaaactgagccacagagtatttgaataacttgttcatgtcacaaacctggtgagtagaagctggattaaaacccaggcagtctggctctggaattgatcctctaaaccacctcactattctgtctctgaataaactcttccagatgactttttgatgacagttcatttttatactgttacaggtcatattatatgcattaccatgcaggttatttattcaagattcgtcccttttttagtgtctcaacaccaaatctaagcatttacaatgcttacccaaatttataattatttatttatttgtaggtttaactgttttttgttttgtttgtctcattaccagactgaccataaggacaagtgtaatgtctctttttttcagttttttataaccagcatctggcacagagcctgcacctagtagctacttgtattatttgttgaataaatgaatgaaaaaaatggccatagttaagtagatgtatgattcaccactgtttcttgtagcttacaatttttactcagatccttatacctaagagggtatgacagtattgttaaatacaggtgacttaatgcagatttaaaaatagtttttggccaggcatgatggcttatgcctgtaatcccagcacttggggaggctgaggtaggtggatcacttgagcccaggagtttgagatcagcctgggcaacatagcaagaccctgtctctacaaaaaacaaacaaacaaaattagcttggtgtggtggctcatgcctgtggtcccagctaccaggaggctgaggcaggaggattgcttgagcccgggaggtagaggttaaagtgagctgtgatcatgccactgcattccagcttgggtgacagagcaaaacctgtctcaaaaaaaaaaaaaaaaaaaaaagagtaataacattttttgaaaaacctttaacattataaaaaccaatacagaataaaaattaaaatgttctcccttatgttaaccccatctccctttctgctttccagaaggaaacaccatgaacactttcatgaggatctttctagatccgtttctataaatttataaggatatttttaatagttcttttacagttttgtttgtgcatttaactctcttgtttatgggatttattttcatgcatgtatgaggtcaggctctaattgcatattttcccaaatagttgatcagttgtcccagtgtcacttaatcatttttccagttttgaagttttgctgttatcatgtactaaattgttatatgtacttggattggttcctggacttttttttctctttaattttttttttttaacagtatgtgtgaaaaaatatgtcaaagaattccacttggcttcaaacagaaaagcagtagacccctgccctaattctattattcaccaattcccactatctgaagtaaataattttcaattatttatcctttgtattctgatagtttttgaagtagcatgcatattttgcttttctcttgagttttcggttttagatactttctgttgtcttcctcctattcttttctcctttctcattacttctacccttcagcctgccagcatttggtatttgtattgttataattctataaatatttaaacttattacagttctttccccaaaccagtatttattttttttggtgctagtagttgtcttgtcctttgcttagtttcctatgtacctgtaactatttatctccaaactctctgttagaaagtaaaatctatcagttcatttaaatacatcaggtcaagatgtccatatttttagactttcaatatttagtggaaataatgaaaaatactcttttatattgaattaaattttatatttctaaataacttttttctgaatataaaagcatcatctaagagaaaatttgggaaccaccaaaatgtgtacttaaattattaacattaatccttaattaaactgtctcctcaatatcaacccctgatattctgcctgctgtctattcttaagtgcgcacatgtgcgtgcacacacacatgcaatgttatctgttgctgtaacaaaccaaccatttatttagcttactgttgtgggggtcagcaatttagggtgggctcagctgggcatttcttctgctgatctcaggtggcctactcatgtgtctgtggtcaactgcaggtcagctgtaagtcagcaaggcagccctgcttcagggagttgattggtagtcagctgggaccatgaggtgggtctctctcatcatctagcaggctaattctggtttatgtatatggtggcctcagggttccaagagcagcaagagaacaagccccagtgtacaaatgccttttgagtctgtttgtgtcaggtttgctaatgttccagtcaccaaaagcaaatcacatgaccaaatccagactcaaggggtaaagctcacatcttggtaggaagagctacaaagtaaccttgaaagggagcttatatacaaagataagtagaatttgttgccatttttgttacgtagtatatattacatatatacccagtatcaactgagtatatatgtaaacatttccaccatagagaacactactatgttttctccaggctctcaaaaaaatcgtaattattgggccgagcgtggtggctcactcctgcaatcaggtgttgtacagagctcaacccctgtaaaggggttgatactgtagtatatattacatatatttgttatgtagtatatatgacatatattacacatatattacatatatactccctccccacacacaaaattaggattatagtatatagcttttatttttcacctaatatatcacggtcatagtaaaatttagcaggtctattttgatggatacttttttgtcgtaatcttttttcctatgccagtggttggcaaactatgacccatgggcagaatacagcctgctgcctgcttttataaataaagtttttttgaacgcattttacatttgtttatacatattgtctgtggaacttttgcgttataacagtaaagttgagtagttgtgacagagaccatatggctcacaaaacctaaaatatatactctgtctatttatgtatttttcttttctttcttttcatgttcagccagcaggaaaatctctggccttttagagaaaaagtttgccagcccgttctatactattgtaatcttggttaagttaggccagaggttagtggagttagtgtgaatctcttgccttgtctgcaaatttgcctaggggtaggatgatagaatggatgactaattgcttgagtatgtccttcagctccaataattatggcttttttttttttttttgaggtggagtcttgctttgtcacccaggctggagtgcagtggtgcagttttggctcactgcaacctccacctcctgggttcaagcaattctcctgcctcagccgctcgagtagctgggattacaggtgcctgccaccatgcctggctaatttcttttatttttagtagagacagggtttcgccttgttggccaggcatgtttcgaactcccaacctcaaatgatccgcttgccttggcctcccaaagtgctgggattacaggagtgaaccactgtgcctggcccagtaattataattttttgagagcttggagaaaacatagtattctctatggtggaaatgtttaattctcaaaagtttcaaatcttctttatcatattgagtgaacttggtgaatatttcagagaaagttgacaaaattcagccactcctctaagttttcttgatgtgtagatacattaatgaaataaatatgtatagcaacccatccgacatgagtgtagctattcagtggtgatagtatctgcaattgtcatgtagaacgttttcattcatggatactgggtgtggaaagataactttacctttgaaaactacttcgttaattgaccaactgtctgcccagtaaatttatctttcggttattttagctttttaaaagtttggctgtcacaaaattatagagaaattggaagtacaatccaaatatctttttttattgagccatttaagagtatgttgttgccctgatgttccctcaccctgaaatactttagtgtctatgtcttataagcaaagacattcttatacataatcacaatataaccataagaatcaggaagttaaaattgattcattgttgccatctaatactcagaaccggtttaaattttagcagttgtcttaataacgcttttataaaagcaaaagaatccagtcagaaccatgcattgcatttagttatcactttagtaacttcttcagtctggaacacttcttcagtctttccttgactgtcatgattttgacacttcagaatattacagcttatctagaatgtctcttaatttgggttttctcattagactgaggttatttatctttggcaggaatgtcacagaagtgatgccttctgctcattgcatcttataaggtggcacgcagtttcattttttctcattaatgattgataacttgattaatatgatatctgctaggtaaaaaatataactttacagttatctttttgcctttataaaagaggactttatggggaagaactctgaaattatataaataacatgtccttacaaaaattcagtttactcattttatttatatctttatggacttgtgattttccattttattcggtgagttataattattatatgatttgttttggtactcaagtgggaaaccagttaagttgcttgtgtctttctgacatatatcaatcattcttggaacgcttccttattttttggcaaaagatagtgttccaggctcaccttatattttccctgccctagtctcggattcagacatttctccaaggaaccctggttccatttagtgaaaaataacatttgaacgctgtgttctgggagttagttttgctcattgctgttggagttgctgctccaggccctttcagcagacagctagagaatatacacaatgtattgtgtacacaaacccagactcatagacatatacatttatgtctatattttttctgtatctgtctgtctgtacactgaaaattatgagtgtttataccaatacatccagttccattccagtaccagagggcccattctaattttcttcctttctgtatgtttaactgaaaaaccttgttcctgattcctctgaaagttaaaaacagaattaccatatggtccagaaataacatttctaggcaaatatccaaaagaattgaaagcaggtactcagatacttgtacaccagtgttcataggagtgttattcacaatagccaaaaggtggaaacaaccaaaatgtccattgataaataaacgaataaacaaaatgtggtgtatacatacaatggaatattattgagcctttaaaaggaaggaaattctgacatgtactacaacatagatgaaacttgaagacattatgtgaagtaaaataagccagtcataaaaggacagatattgtatgattccacttataatttccttccagttattcattactattatagaagtagaattcatttttgtatatttaccctgtaacctgcaacttgttatatcacttattggttctagttgatatttttggagtttctttaggactttctaagtacccaaagttgcatgtttcattctctagtaaatactgttttacttcttcctttacagtgtttacctttcatgcagtacaaggctgaattagagtgatgagagtggatacccttgccttgttcacaaccttgtggtggaaaacattctggtccctcactgttctgtatgacatttgtgctaggtgttctgtctatgccctttgtcaggctaaagaagtttccttctatcgctagttggctgaacatttttataatgagtggatgttggattttatatttaaagttttactgcattccttggtaggattatatgttttttctcctatatcctgttgatatggtaaattacattgattagtttttgaatgttggcctgactgtaaattagtggaataaaacccacttgatcatggtataggacccattttatataattgttagatttgacttgctaaattttgttaaggattctttccatctatgttcataagaatattggtctatagttttctgtaatgtctttatctggctttgatatcaaggtaatgttggctttataaaatgagttgggaagtattgatattacttcttccttaaatttttgatagaattcaccagggaagccatcttgcccttatgtgttatttttgggaagacttttacttttaaatttaattttaaaaatgagtataggagtattcacattttctgtttctgagtcagttttagtaattagtatctttcaataaatttgtccattcaagtttttgaatttattggcataatgttcaaaatattctcttatttctttaagtgtctgtaggatttgtagtgatatgccctctttcatttctgatattcataatttgtgaatttgtgtctatctccttttttttgcttaatctagaattcattttgctcaatctgtaataggtagtagaggtttatccattttattgatcttttaaaaagtttttgttgactttctgtttttccattttctattttgttggtttctgctttttttttttttaattaccattgttttactttctttggatgtaattttctcttctgctagcttcataagattgaaacttggccaggcatggtggcttacccctgtaatcccagcactttgggaggctgaggcgagcgtatcacctgaggccaggagtttgagaccaggctggccaacgtggcaaaaccctgtctctattataaatacaaacaattagccaggcatggtggtgggcgcctgtaatcccagctactcgggaggctgaggcaggagaattgcttgaacccaggaggcggagcctgcagtgagctgagatcgtgccattgcactcaagcctgggcaacaagagcgaaactccgtctcaaaaaaaaagaaaaaaaaaaagattgaaacttaaatagttgataactgattttggacctttttttttcctaaataaaacaccaatgaaagctatacatttccctctaagcacttctttatctgtgtcccacaaattttgatgttgttacatttttttctgatttcccttgtgatttcttctctgacccaagatttatttagaagtctaaataaacactaactaggtgttttttcctagatatttttctcttactgagttctaatttatttttgtgtggttagagaatagattctatatgatttcagttcttttaaatttgacgatctgtcttggcaaatgctctgtgagtttttggaaagtatgggtattcatttataaaaatcagttaggtcaagtttgttgattatcttgctaagatcttctgtatccttgctggttttttttggtctacttataaattaattagagaatactgtaagggtcctataattgtggatttgccttttctttcaattctaccagtttttgcttcatgggttttcatggtctgttattagctgtatacacatttaagattattatgtcttcttgatgtattaacccatctgtcattatgaaatgtctttgttctgagatctattttggctaacattgatatagccactccagctttcttaggattaatgtttccatagtatatatttttcatccttttatttttaacctatttgtgtctttagatttaagataagtttcttataaataattgtcttctttatttatccaatctgacaacctcttctttttaattggaacacttatactatttacattcagtgtaattatcactgtggttactatttgttttctgtttgttccaacttttctttattccccttttctgtcttctttgaattaattaaacatgttttaggattctactttaccttcaccactgtcttcttaagtatacctcttagttttatttttgtgagttgcttcatactttgcatcttaaacttatcacagtgtaccttcaaataatatttcaactcacaaataatgtgtaagaaccttctgccaatatacttccgtgtctactctcccatgttttgtgccatttttgtcaaatattttacttctacatttgtcatagccctcacagtgttttgttatttttagtttaaatcatcagctatgtacaaatttacaaatgaggaaaataatttctttcttaaccctccagtttttcacttctggtgcccttcattttgtaggtccaagtttctgtattgtgtaacttttctattagcttaaagagctttatttaacatttgcattgcaaatattttttcagctttttttcttaccttcatgtttttaatggtaaaatatatataacataaaatttaccatttatctgtttttaagtgtaaattcagtggtattatgcatatttatatactattatctagtgccagaaccttttcatctttccaaactgaaacaccatacccatgaaacaatatctctgtatttccctattgtccagccccaggaaaaatgccgttctcctttccgtctctatgaatttgactactctagatacctcatgtaagtggaatcatgcaatatttgtccttttgtgtctggcttattttactcagcataatgttttcaaggtcatccaccatgtagtatgtgtcagaattttatttctttttatggctgaataatattccattgtatggatataccacattttgtttgtccgttcatctgccagtggacatctgggttgtttccatctttttgctattttgaataatgctgctgtgaacattggtgtacgtatctgtttgagtctctgttttcattcgtttgggtatacacctaagagtggaatttctggaccatatggtaattctatatttaagtttttgaggaactgccaagctgtttttcacagtggctgtaccattttacagttccatcagcaatgcacaggggttccagtttctccacatctttgccaacctcattatctgttttgttgtcctttttaaagaatagccatttttaagggtgtgaagtggtatcttgtgtttttgatttgcatttccctaatgattagtgatgttgagcatcttttcttctgcttattagccatttgtgtattttctttggagaaatgtctattcaagtcctttgcccttttttgagacagggcttcactctgtcgcccaggccggagtgcagtggcactatctcagctgactgcagtgtccgcctcccaggatcaagcagtcctcccacctcagcctcccgaatagctgggattacaggtgtgtgcccccacgcctggctaattttttgtatttttaatagagatggggtttcaccatgttggccaggctagccttgaacttctggtctcaagtgatcctcctgccttacctctcaaagtactgagattacaggtgtaagccaccactcccagccccattttttttaaatttaatttttattttaagttcaggggtacatgctcaggtttgttatataggtaaacttgtgtggtagtggtttgttgtacagattattttgtcacccaggtattaagcctagtacccattagttatttttctgatcctctccctgctcccaccctctaccctctgataggccccattgtgtgtttttcccctttatgtttccatatgttctcatgatttagctcctacttataagtgagaacatgcagtatttggttttctgttcctgcattagtttgctaaggataatggtctccagctctatctaagtttctgtaaaggacacagtctcattttttttatggctacatagtattccacagtgtatatgtaccacatttttaaaatctagtctaccattgattagcatttaggttgattccatgtctttgctattgtgcatagtgcttcaatgaacatacgtgtgcatgtgtctttataatagaacaatttatatttctttgggtatatacccagtaatgggattgctgggtcaaatggtgtttctgtttttaggtctttgaggaattgccacactgtctactgtcttccacaatggttgaactaatttacattcttaccagtagtgtgcaagtgttcctttttcctttttctctgcaacctcaccggcatctgttttttttttttttttttttttttttactttttaataatagccattctgactggtgtgagatggtatctcattgtggtggttttgatttgcatttctctaatgatcagtaatgttagcttttttccataggattgttggctgcatatatatcttcttttgaaaagtgtccattcatgtcctttgcccactttttaatgaggttgtttttcctttgtaaatttaagttccttatggaagctggatattagacctttgtcagatgcatagtttgcaaaaaattttctcccattctgtaggttgtctgtttactttgttgatagtttcgtttgctgtgcattaactctttaattttattgggtgtcatttgtcaatttttgcttttgttgcaattgcttctgttgtcttcatcatgaaatctttgcctgttcctatgtccagaatggtattgcctaggttgtcttccagggtttttatagtttttgttttacatttaagtctttaatctatcttaatttttgaatacggtgtaaggaaggggtccagtttcaatcttctacatatgcctagcgagttatcccagcaccatttactgaatagggaatcctttccccattgcttgtttttggtaggtttgttcaagatcagatagttgtaggtgtgaccttatttctgggctctctattctgtttcattggtctatgtatctgtttttgtaccagtaccatgatgttttgattactgtagccacgtagtatagtttgaagttgggtagtgcgatgcctccagctttgttctttttgcttagggttgccttggctttttgggctcttttttggttccatatgagttttaaaagagtttttcctagttctctgaagaatgtcagtggtagtttaataggaatagcattgaatctgtaaattgctttgggcagtatgacctttttaatgatactgattattcctatccatgaacatggaaggttttttcatttgtttgtaagaaatctctgatttcttcaagcagtgctttgtagttccctttgtagagatctttcacctacctggttagttgtattcccagttattttatttatttatttatttatttatttatttatttatttatttatttgtggcaattgtgaatgggattgcattcctgatttggctctcagcttgacagttgatggtgaattggaatgtcagtaaattttgcatattgatttagtatcctgacaagttgtttatcagcttaaggaggttttgggctgagactgtggagttttctagatataggatcatgtcatctgcaaagagggatagtttgacttcctctcttcctatttggatgccctttatttctttctcttgtcagattgccctggccaggacttccaataatatgtttaataagagtggtgagagagggcttccttttcttttcttttcttttcttttttttttcgttttgagacagagtcttgctctgtcgcccaggctggagtgcagtggcacaatcttgggtcactgcaagctccgcctcccaggttcacgccattctcctgcctcagcctccctagtagctgagactacaggtgcccgccaccttgcccagctaattttttgtatttttagtagagacgggatttcaccatgttagctaggatggtctcgatctcctgaccttgcgatccgcctgcctcagcctcccaaagtgttgggattacaggcgtgagccactgcacccggccgggcttccttttcttgtgctggttttcaggggaaatgcttctagcttttgctcattcagtatgatgttgcctttgtccattttggaattggattgcttttgtcgttgttgagttggtggaagttctttatgtattccagatattaataccttattggatacatgatttgtaaatattttctcccatttggtgtgttgcatttttactctgttgatggtggtctatgatacataaacgtttttaattttcatgagtccaatttatctcatgaagtccattttttatcaccagtgcttttggaaaagttttatggttttagcttttatatttaaggttttgatccatgtagagttaatttttccatatattataatggtgcaacttcattgtttgtgtgtagatatccaggtttccctgcaccatttgttgaaaaaactgttcttttcccattgaatggtcttgataggctgctgaaaattatttgaccatatatgtgggggtttgcttttggaatttctattctgttccattggtctatatttctgtttttatgccagtaccatgctgtttttcttactgtagctttgtagtaagtttagaaatcagaaaatgtgagacctccagttttgttctttttcaagattattgtggttattcggggttccttgagaatccatgtgaattttaggatggtattttctatttctgcaagaaacttcattgggttattgataggaaccgtcgctttgttttgaaacacattttcactgggtattgaagtttaggttcacattttctttctttcagcacttaaaagatattctgcccttggcttgtcttacatagtttctatagagtaatctgtggctgctttaaaaattctatcttaggccgggcatggtggctcatgcctgtaatcccagcactttgggaggctgaggcgggtggatcacctgaggtcaggagtttgagaccagcctggctaacatggtgacaccctgtgtctactaaaaatacaaaaaattaggcaggtgcggcggcacatgcctgtaatctctgctgctcaggagtctgaggcaggagaatcacttgaacccaggaggcggaggttgcagtgagctgagatcactttgggcaacaactgcgaaactccgtctcaaaaaaaaaaattctatttttatctctgctttcagcaattcaactaaggtgtgtgtgtgtgtgtgtgtgtgtgtgtgtgtgtgtgtgtttattgtgtgcttggggtcattgagctttttggatctatggttttatagttttcatcaaattatgaacaatttgagccatttaaaaatattttcttaagtactcatttttttcctttcagacttcaattatgtgtatattagacagcttgatattatacatcactgactatatgttcattttttaagctattttttcttctttgtgcttcattttgtctaccttctattgccgatttgtcaagctccttgatctcttctgctatttctaatttggtgttaaatcttactagtggatttttcttttcagttattgtgttttcatctgtagaagtaaagtaatgtagttatcacctctttgtttccttttctctgagatcacaattcagtgtctgaaaagtactgtttcatatatcttgtccaatttgttagtagtttatggtgcaagataagatttctgttttttcgtatggctaaaagcagaaggccatacaatcatatttttaaggacatttattgtttctttaaatgttggccttttggaaaacttaaacaaatatatgcattgttctaagtgaaaactactataagccagatgttgcattacttgtgcaaggttaacgtttcattcagaagataattgatattgacaacagcattggaaacatgtatgaatcttttaaagaaagatgcttttgaggtttagtgaagtaggcacacatcagggcagtaaaaatgtcagattctccttgttactcagtgaatctggagtaggagaagcagtcaccatcctggggtacttcatgatctgtgttgatgatctgctattttgaccatagttcctcagccttcttgaaacttacgacctaatttagccattaattcaacagcaccactacacatgggacttcgttgtcatttggaaccgtcccacctttaaactgaaaacttgttggtccccatattagtcatacagggcctttttttttttaaacacaaacttttccccattcacatcccactacacatttacacatcactggatgtttgtcaattatttttcctcctttctattgattcttttccttagctataaccatgttatgttttctcctgtccttccacaaggaaaccttgtctcagctctttccttaatctaatattctgaacaatagtagatgtgagagcagtctgttttcctattcagtcatctcattaacctgtatgattgatttgactggccttactggatagtctgtccagttccctttcttccttggcgctttttggtgcatttttcccagagggcacataactggatctattagtacgacaaaaatcttatcaaattgagtaaaatgattctgcaagccctgaaaaactagttacttctccttttggtagtatctctaccctgtatattgttttcttttctgtgtatgtttttaaaaaatgtaattgtttttataaaagtgatatttgcttataaaaattctagtaacatcaaagattttacagaaaaaaatgatgagaatcccattatcagtctattcgtcaaatagcttttcttcttcttttattgtcttttattttttgtcatttactaattttatgtaacgcttatagggaagacatttcattcattaatttatatttttcacatcaaaaaccagtcacacgaggtttttattatgtcttctgtcatttagttcttttactggtggctattactgattcttctgacaatttttagtcattaacaaatgttttcatgtgcagttttagttaatgtgagatttatttattttgttgcttatttctaccagtaatattcattgagccttcaatatctgctgagaatgaaatggtggcctgatgtggtgatattcacctgtagccccagctacttgggaggctgagacggaaggatcacttgagccgaggaggttgagggttgagaatgaagtgagtcataattgtgccattaaactccagcatgggcgagagagagagagagatcctgtatcttaagaaaaattttaaaaagacaaaaaatgcaaaaagtagccaggcgtggtagcatgtgcctatagtcccagctactcgggaagctgaggcaggaggattgcttaaacctaggagttcaacgttgcagtgaactatgattatatcactgtactccagcctgggcaacagaatgagaccctgtctgtaaaaaaaaataaaattaaaaataaaaaggtaaaaaatacaagaaaaaaaaagagaatgaaattgaggcaggagaatagggtctggaggcagggaacctaaggccgattcacactgacttcctaaaactgaatcaaaaagaaaaactcacctctccacccccaagtaacaaaaggatcagaggctactctgtttgcaacaccctgcctttctactgaatggcaggttaaagaatggaaagtacctctccttcccacaaccagtcttcatgtgcatagggtgtaactctgtaacttcacttcagcctctgattggtcccctctcacaaccaatcagactggtcatgggccatgtcttcctttgcataggatgtaactgtagcttcccttcagcttctgattggttgcctcccacaaccaatcagactggtcacaggccacgtgtttatttacatagtgtgcaacaaaataaccaatggaaacctctagagagtatttaaactccagaaaattttgtaaccagtgctcttgagcctcttgctcaagccccctcccactctgtggagtgtactttctttctttctttctttttttttttttaagacagagtctcgcttcgttgcccaggctggagtgcaatagcgggatctcagcccactgcaacctccgcttccctggctcaagtgattctcctgccccagcctcccgagtagttgggattacaggtgcatgccaccacgcctggctaatttttgtatttttagtagagacagggtttcaccatgttggctaggctgattttgaactcctgacctcaagtgatccactcccctcggtctcccaaagtgttgggattacaggcgtgagccactgtgcctggccctttttacacttttgtaaccagggttggcaacttaaatgagcaccagataggtagcatgaatgaaagaaggggtctaagtataagtgcatgtgattacattctttaagtggcagggactgtgataccttgagagtatatgtctcatccaaatgtggcaatctagtcaatgttagtggattgctgtcctgtaagaatacaggcctaatgtggccagtcaaccagtttttctagaagaaaccagcactatggattttcatctcataatttttaagtagttcaaatttataaaactctgtgtagccattcaaaacatgattgtgaagcaggtatgatttgtggacctccagtttgcaacttcagctactaagtaagtttattttagtggtgttttaggtgggaaggagggcaaatgtgtgtacctaatctgccatattagactggaagtctcgtggtttcagttcttatatactgatctttaattcaactgtaaattattttgatgtaaggtgggagataggatctaatttttttccccaaatagtcattcatctaaatattagttgaataatttcccccacagatttgaaatgccacctgatttaaacagggtggtttgctttttttttttttaatttttaattttggtgggtacatagtaggtgtatatatttatgaagtacatgagacattttgatacaggcatgcaatgtgtaataatcatattagggtaaatgaggtatccatcacctgaagcatttatcctttgtgttacaaataatccaattatactcttagttattttgaaatgtacaattacattattttttactatattcaccctgttgtgctagcaaatactaagtcttatttattctttctaactacttttttgttcccattaacaactccactctctcccctccctagactaccttgcccagcctctgaaaaccacccttctactctctctctccatgagttcacctgttttaatttttagctctcacaaatgagtgagaacatgcaaagtttgtctttctgtgcctggcttattttacttaacataatgacctccagttccatttatgttgttgaaaatgacaggatctcattctttttatgactaaatagtacttcattgtgtatgtgccacattctcttcattcattcatctgttgatggacacttaggttgcttccaaatcttggctattgtgaataatgctgcaataaacatgagagtgcagatatctcctcgatatactgattttctttcttttggatatacacctagcagtgggattgctggatcatatggtaattcaatttttagttttttgaggaatttccaaattgttctcgatagtggttgtactaatctacattcccaccaacggtgtatgagggttcccttttctccacatcctcgccagcatttgttattgcttgtgttttggataaaagccttttttttttttttttgagacaaattctcactctgttgcccaggctggagtgcagtggcatgatctcggctcgctgcaacttctgcctcccgggttcaagtgattctcctgcctcagcctcctgagtagctgggattacaggcgtgcaccaccacacctggctgatttttgtatttttggtagagattgggtttcaccaagttggccaggctggtctcgaactactgacctcaggtgatctgcccccctcggcctcccaaagtgctgggattacaagtgtgagccaccgtgcccagccaataaaagccattttaattgggatgaaattatatctcattgtagtttggatttgcatttctctgatgatcagtgatgttgagcaccttttcatatgtctgtttgccatttgtatatcttttgagaaatgtctattcaaatttttggcccatttttaaatcagatttttaagggagtgatctgctttttaagaaatagaaacccgctaaaagaaagatcatgcaggagatataattcccctcattggaaatgaaaagtttttaggcagcttctctgttctctttggggcctctggtgtgacatctgcatttctcagcaaagttttctcattattttttgtagattggtttttctagatacttacactctttcatatgaccttaccatgacatctcaaagtggaagcctaaaatctaccaaatgatgtggcctattttctgtaattaatcaactcagtctaaatgccccaaatacaagttcttgggaaagtgaaactaattgatcttgctatgcctgagagtgtctttggatatgtgttattaatgtggatattaggttcagcctttcagcaggggatatagatgatttcagagtaagtaggtggacacatgtccatagaggtgcctaatacagcatctttatcatatatttgaaattcttacatctatagaaatatataccctacttgcccatctttcccccccctcccccctttttagagatgaggtcttgccatgttgcccaggctggtctcgaactcccaagcacaagtgatatgcctgccttggcctcccaaagtgctgggattacaggtgtgagagatcacacctgtccccatcttatttttccaaaaagttttggttattctcacttatttattttcaagattaaatttagattacccaaaaaaaaatcttgctgggattttgattggaattcagacaaaaattagaacaaaaaagattaagaaaagtagtttactagtctacaaaaattgtgaacccagttttcatgagctgcaacctgcagaacccatttttacctatgagcacacaatttttacagtgtacttttgctttttcctttctaacttgaatttacgaagagaatttctcacacatacaatgcacctgcaataaccattggttttctagaatctctgataatactttaaatgtattctgtccactagccacatgtatttatgttttttgattaattaaaattaaaattcagttagttgtactaattacatttcaagtgcccatgcggctaatgccaaatatattgaatagtgcagatatcaaatacgctgtcatcacagaaaatcctgttgggtagtgctgctttagagacttgtatgtaataataaccatttaatttttaaagcccatagaagcacaaatctctatgtcatatgttttgtttatagcattttggttaatatgtggaaaatgacatgataggatagcattgttttctcattttaaaaggttcattgaagaaagtttgaaaaataccataaaggagaaagtaaaaattacctgcaatctcaagagatagggttttttttaaaagcctttttgaaatacaatctataaccaagtgtacatatcataaattacaattggatgaattttcaccgactaaataatacatatatgtctttttaccacagtttctctattcccaggttctttttgattcatgtcttgattgtttggatttaataatcatgtagttttattgaagatgggcacaagagtatatttcttatatcaggaggcatatgaagccagttagtctcaataccattgatgctgaatttcaccacttggttagagtgtcactgccaggtctcttcattgtaaaggtacattttccttttgtaattaatgaataatctgtggggtgatattttgagactttgtcaatattctgttccctaataacttttcactgaaagatttcagcatccatttatgtaacttgcctgaatcagttagtacaggaaagttgcaaaatggtgatttttaaaattctatcattttatttacaattcttagctggcattcttatttaaagaagatattttccgcctacccgcccacttccccattttgctcgtttgagtcttctttttcccctttttattttttataaacaccctgggtttttctcatgaagttgatcggtgtgactcatcactgctttgagactcattgctataatcacatctatgtaaagttctattataccaggataatttttgctttatagcaggtcagtcatctttatgatatgcttgttcttaaactgataattcttattgatttactctattgaaacacagacttttcagaaactggagcaactgtgttaaggaattcccatttacactaggcaagaaagtaaacagtaagtggagagtagggtaacaaacacttatggtatcaaaaaacaaccgtgaaaaggatctgtcttaatgtgctagcccactgcagtttaacatattgcttacaaccttcacaatagaatttgagtgacttcagttacacattccaggagactggcagtctgttacaatcagagtctgaactttagagcaggctaatttacagcgatgggatgaagaaagttgtggatttgtattacacactctcacctgacactgtatctgatcccctacctgctgattgacatcttgaatgagctctttgaagcaagttccagcttaattaaaacgtttgcttggttagcagtgatctatgaaagcctgtgataaatattgaatcaggttcacctgctggttgctgtgagtggataaacagctgctttgtgcagtctaatcatgaaacggtggcagtagggtactactactgtttgaatttttaaaaaaagaatagttgaaaaggtatagttatgttacttttgctatcttactagagtgtgtgctaatgtgagattttgcacaacgggcattcagtacctgtttagatggcttggacaacagcaaatggttgataaagattaaaaaacccttttttatgtctcaaagtttgtagtataattctatgttcattggccttttaccactagctcttcatatgcatgactttttgaaataaagggcagtgttttgcttttttgcttaagtggtagatgaaaacaatcctgttaaagcttcactttaaagatttaaggttatgaatttcaacttctccacaaatttattgtgtattttgtgggaatttgaattcttctgaatttccttttttatctgtaaaatgaagttagaaatatacattagtgaactgagtattttagccttatgttaatattaggtaattaacaaacattaaaatagaaatgagttcagaagcagtggaggaaactttatgaaattctcttggctgttgtttattcctttacagaataactatgtctggctaatttggttataaagaaaatgttgtttccatttgattttcgttaaaaaaccagatataaattctggaataaagccctaacccaaatcagtcacaatctgctttgagcacttgattaaagttaggggttcactttctaaaaatgcacacaaaattgtgtctgtagtttctgggtgatctgtaatagcccatggaccctaatttgagaacccatttcctaataaattaggttgaaaacttttgaggaggaggtgttaagatgaaagctattctgctgggtatgaaacaactgaggagaaaccagaacagagtatatttactgtgggtttttttttttttttccagcacttctagcatttttcaggtatgtttttcatgacaattgttagcttttaagattatcttccatagtcttgattcctcactctctacctgaagttttatatttttatttctatcatcaacttatttagaattttatggggaaaatacaattttgtttaagccatactcagcctgttcaactgcttgttcatgtttatcgatgtcgatgcatacaactgtcattcatatattttcattataatattattccattgattggaaagagcccacaatttactcatccattccttctgttgatacatgtagcttgtttttctcactattaaaacaatgctgcaattaatattcctcttgtatctgtcttaatgtgcaagagtttttctagcatgtatacctaacagtgtcatgctgggtcaaagggtatatgtatctttgatttcactagatcaccaatttgctctcaagtagttgtgccaatttatacttcgatcagcagtgaataagagtttcttcatatcctctccagtacccaatctggtggataggaaatggaatctaattatggttttaatttgcattttcctaattactagtgaagctgtacattagatggcacatcttttcagatatttattagcctttcagcttttctcttctgtgatttgcctgttcttggttttctgtagggtttgtcttttaaaaatagatttattggaattctttatatgttgtagatactgatcctcacttgactgtaagcactgcaagtatcttctgtcagcctgtgccccctttttacctatttttctttccttctttaaggaatatgtatctttaaatagaagtttaacatgttaatgaagctgtgttttcactcatttgtgtttttggtttattgttttaggaaatccttctctacatttcgatcataaaagatatcttcctatggaagaagagaccatatagcctttgaagcttgaaatgtttactgtctggctcttttgctgactcttgctctaaagagtctattaattgaaagtttgtgttttttatttttcccttgggggacataatatggatcttgttataacatatttgatttaaatgtcaactaataagttaaaacaatttttatgaagatcatacttaggaatattttgtaattgcattcataaaataatataactaactttaaacaattccttggtttatgagtgaaaatggtgtgataaactccaagaactacactttgtagaacaatttaagaatgaagctctctttgtcagtaagatgaggtgatccttgtcattgtcttctccgtggcttgatatatagggattccaatgtctcttgagtcaatgaatgaatgaaatgggatattagatgaaaaatgtttagcacaaggacaggcttaaaaatggcagtattattactaatgaaaatattgggatatatgtttgtcacgactaaaatactagcataagatggtttttctttttggccttgaaaaatagtaattgtcctgtactttttcctttaaaagctaatctggattttgaagtatctttttgatatgtgcagcacttcaaattaggacatcatttaagcatctgtcagatttaattgtaatgcatgggtacagtatttggttcagggacatttagtcataattcatcagtttaaaaaaagctaagttacagttatgtgcaaaacaccactctcgatgaatgagctatataaagaaatgtaagacatagtttctgtcttcaaggaatttgcagtgtggttggaaagacaatacatgcacatgtggaaagttatggaagaacacaagtttttgtattttttttttttactgtttcattgacctagttttccttttatttcactcaaacaggtttctcttcattctctttttctctctacttctttatatacttagttttcgtactcctgcctgcttttgaaattcaatttgtagtctcctttgagaatctctcctgatttacagttagcaaaggaacttcttctttggcaatgaaattagttcctatttctttatcattttccatttctaaaaatatttaattgctatgctcatttttcaggtatttaggcatagtatttttttgtgtgagtggtagggaaagtttggagaaagttataaatctttagaagttgacattgtggtatgttaccgtttgaacttataattatagcttgtgaaaggaacagtggcaaggactcagcaattcatctttctttcaagatcaaatcttcgaactcttcatctttgaaagaatgtagacatgtctctatataatacaacaagagagggaatataatttattaaacacaagaaaaattttctgaaaatccttggttgctgatgttctaagaacagttttgataattgtagatttgaaatgtatttttaaacaattggctactgcacatggaaatattatagctgtcacatccacatgtatctcctgttttttttttttaatgatagtatatttttgcagttacttgggttgggttttcttgccttttcttgaagtaaaaggactctgaacagtttctagcttggagaagaagccatttcttaaagagtttggttctggcactgtgtagccacttacaggtcttagagtttacagattttggaaagccccatgtcttatgtattgattttcagatatattattggatgagagtgaatattataaaatttattctctagtttcctggagaaaaggaaatctctgtcaatttaaacagcaaagggaaaataaaaaagtctttttgaaagataaacatgatcatttgttagcaggaaaaatactcaataagagatacaaaattatttaattttattcatctaattgttttaagacccctgggtcaaagggtttcagagagaggccataaagtattagcctggtaatttgattgggggatattctgacctcctgacactgctggcatcaggatccttcctctagttttcttagagcattgaaagttgctgattttggtacaggtaattatcttttgttataagtgactttttgaagcctttgttatattactacaatcagtttttctgtcttcaaatatgattgtaccaaatcttttattatttatttattttttgagatggaatcttgctctgtcacccaggctggagtgcagtggcgtggtcttggctcactgtaacctccgtctccctggttcaagtgattcacctgcctcagcctcccgagtatctgggactagaggcacatgccaccatgcctggctaatttttgttttttcagtagagacagggtttcaccatgttggccaggctagtcttgaactcctgacccaaagcaatccacgtgcctcggcctcccagagtgctgggattacagatgtgagccaccatgcccggcctgtaccgaatcttttaaatggaaactttaatagaagattgcttctgaagaaataattcctgtttaataatgcaaagggaaaagaattaacttttaatttccaccttataccttacttgcctaagtacctattgaaaaccatcttcttggccgggcatggtggcttacacctgtaatcccagcacttcgggaggccgatgcaggcggatcacctgatttcgggagttcgagaccagcttgaccaacatggagaaaccccatctctaataaaaacacaacattagccaggcgtggtggtggacgcctgtaatcgcagctacttgggaggctgaggcaggagacttgctggaacctgggagatggagttgtggtaagccgagatcatgccattgcactccagcctgggcaaaaagagtgaaagtctgtctcaaaaaaagcaaaacaaaaagaaaaacaaaaaaagaaaaccatcttcttgaggagtctacttaagttcatagatgttataatttgttcatattactttacaacttaaaaaaacaaacaaaaacatttaatataaagttagctgtggtttataatattctgaattatggagtgaaaaaacagatttcaagtcctaactaaagtcactctagtgagaaaagttttctgagactagttcttgatcttttgcttttgttagtaccactactagtgtaacatttaaagataagtagaacattaaattatttgtgccaaattcaccccttttaaaaattaaaaactttgaaaacaaagtatctagttgtaaaactgtataatagcatccctttctatttgaaaaaaagatatgaaagatatgtatatatgaaggtcagtaagttatacactaaattattcgtgatgggatagttgatttttaaaaaatatttctgtattattgtttgaatttttttgaccaagagaaaaggtgaaattaaagggagtagatggtaaagctttaagtggaattgatgttgaaaagtgtaacatcaaaaagtaagttttcccagccttgagaaaaagctactttattggattacttttatgcttagatagaatgtatctatatagtacataacagtgcattgggccatagcattctagtattcacatgaatttaactgtatcataaggaagagaaatagtataattgagggaaaaaattgatggtatgaaaaagtaaattaattctaattgagttaccttaattctttttgtatgttaattgattaatgtgatcattgcaaaagccaaaaagaattcagtcagaaatatcatgatataatttgcattccattttctctgtgaccgtaaattgttggatattgcaacatatgtaacataaaccacatgtcagctgtttcctgcctcactgttgacaagagccccattcataactcttctttttatccttttagtgaataagtaattattcaatatagaaggcaggatatttggaactggctatttaatgtggcagcactctgtaatgaaatctgctgttactggcaacctgagaggagaatgtaacaattccagcatggctgtaactttatctgctttgactgactgtttatttggcacatcagtgaaccttttatcccagtgagtgacagctccagaagggtcacatttacatccattctatcatgtattgtaatatttaatggcggacaaggttgagtgagactgggagtaatttgaacttgcttttccactgagttgaggctaaaagacagcttcatccccagtattgtggtgtaacatgctatgacttagcatttgtttatgaaggctaatcttactgattacaataataaaaaaaaacagtcaagtagagtgtttgttctactaaattaaaactctttagcacacagtcttttaagttacaatgctatttaccttttttccctccccatcaatgaccacttctataaattaaccattttacactatttctctaaaatgagactttgttctgtgtcatttggtgtaataattgagacttagaaggaagtagttattaagaacctgtgagttctaatatatagcattaaacttttttttttagtatttgagaatttggaaacagaagagaaaaatcaggtaaattaagtagactatattcctgatgttccatatggtttgtttaaagagacatttatataactatttcagttatgaaactgagttacaagtgaaattgtccaggaaaaactaccctggatgataattttactgattggtttacactccatgacaggtaactgaatttcagatatacttgttccacacaagcaacctgctttcattattaaatattaatattttgcatttattttcgtacctttgctaaagaagaattttctctttttgaagttgttaagtgatcctttagattcaacttgataattctattcttttgtaaactatatttaaaagtgcttcaaaagcattggtgtattaaggaatatttgaatgaactatgctgtgaacaaaactattaactctaaactataatatcacaagttcgtatgaagcctaagaaaaaattaaaattgttcctactttgttttatcatttttataatttatgaaagaggagagttaaaatgtactcaaaacatttggaattggagagttagagtggtatgttggaaagaatgcaaatttggaaatatcatttataacttttaaaagaaagaatgaggaccaattttaaattgtagttttttctttaatggcaagttttagatactataatttcttgttatttctctttatttgaccattgtgattcattacttacaggttctgattccatgtgaggtttgataacgttttttatggtagtttagatattagttatcgtttctttcctttcttacagccccctggccactgttctaggtgctgttgttctactaaacaaggaaacagtcaagagtcatcgaataccattaagaaggatcatacagggaaatccaagatacccaaaatatattttgggacacgcacacacaagcagattgctcagattactagagagctccggaggacggcatattcaggggttccaatgactattctttccagcagggatcatacttgtgtccatcctgaggtagtcggtaacttcaacagaaatgagaagtgcatggaattgctagatgggaaaaacgtgagtaaagttattttgtgttagagaaaaaataaggctgaaaatatttaaattactcagtatgtgttttatatgtacattttagtgataatcaacttcggaaaatcaaattaactgctagtattgatatcttttaaaaaacaattttcctgtaataaaatctttagtcaagttttaaagtatgggatttggtcttaaagcttgggatatttaattccttgaaattaatttctgttgtagtcagacatcttagtttcttcttttaaatcctgctaccaaaaatagtcaaacttggatgatatcatatgaggagatagaagtgtttaaatggtttagtctaattagatctaattaatatactttatatacttaaaaacttcaaaagcagatagtttatttaggctgtctgggcaaagtttgaattttcttaattgaatgagaaatataatgattatcccacctcataattctgataaatacaaacccctcttttaaaagttatactaaattattaactttcaaaagatgtcattggtggttttgaaattttccagggaaattagaataatatgaatttgggcttggtggaaatagagaattctttcttactaaagacttatatgactttcaaataatttcttttggcagtattagtttgggagcctatgttctggtgtgataattagtttactctaaaattgaagttgcaagtatgaaattatacccccaaatcagtgaaccataaattgattactatgaagtgaccaatgatattttaatatatttttagagttgttttgtttttcactagtatcttattagagttggttctacacaaaaaactgtgagctatagcccccagagtttcatttcattgatatatcaccccctaccatataatgtgaattattttgttttatgcttttcttccttaatactctcttttatagatgaaaatttatttaaactttatttagggatggtcaaaagatactttaacagatattcaaacgagattataaagtataagtagtaaggtgttccaatggcaaaacttgagtgacttgttccgagccaggagagaatacagaattactgaatcaaagtcattgttgaaatcctacagtcatatttatttccaaagagttatttctaactaactgaggaattgtgaaattcctttactctgtatattaaaaaacttctcttcaaggagagatgaaagtattaagtgtcaggtgttcaaaaataataaaataaagctctttatggtaaaactccatgaatttcatgcataagtagactgctttccatagtgactaagtgatctgctgaattcctcaaatgcttgaaatttattttttggctatatagcctatgcaagaagacttgctggcattgtcaccatatttttatctttttttgttttacttgttattggggaaattaattatgtatttgtaaaaaatacattggctgggcctgatggttcatgcctgtaatcccagcactttgggaggcagaggcgggcacttgaggtcaggagttcgagactggcctggccaacatggcaaaacacatctctactaaaaatacaaaaaattagctgggcgtggtggcgcatgcttgtaatcccagctacttgggaggctgaggcatgagaatcgcttgaacccaggaggcagaggttgcagtgagccaagatcgcgccactgcactgcagcctgggcaacagagcaaggctcttgtctcaaaaacaaccaaccaaccaaaaacatacattggtaaaatacattggtaaaagcaatgataaagtgtaagattgtgtattgaaggcagacagtttcattttgtgtaacctagaatcctacagtgctggttacgtttttattgatctttactcataagtttgaatcatgtaaaaataaaaaggaattcagtagacttcaatgttccgaatttttcattggcctttagtttgtcttaaagtgaacaggtattttattttttaatattagtaatatgaataattgaagatatctgcttgtggtttgtcttgacctaattctgcctcagaatgcttacctcacgggcatacatgaacatcctctttcttgttctcaagccctgttagtaatttggtattgtaatgaagggcaattacaaagtcaccataggtgtctgtgtttactttgactgaattaccaaagcgaaatgataaatagataactgacagtttgaatggaagtgtttaaagtgtgataacacttcaattgacagacttcctcagggttgtgttacactgctaaaatggatgagcttttctggttttgctgtcagcctgcagaggggtgtcattctaactgcccttaaagtgtaaactttctgattttttggcttgatccaaggcacatgtgtttttgttcattgtttcttttactaaagtgcccttatactggaaaagtatgcacttatctgttaaaagttaatttttgtttcagttaagaaaaaataattttaactagagtcaggaatgacaattctgaaatattattttagatatatatctttttttggttaaaatgagacttaatagctcatagtcatagattctaaaggcactttagtgatcattttgtataaaggtaagctttcagaattgtatggaagaagcttggaatgaagaaatggtgaatgtcctattattaaactcagtctgtatcaaactgagagtatgaaagatgattgacacgtttttacctgaatcacagaattttagagctggaaggaattttagagatgatatagtcagtgagtcagaaggaatcttacaagccttctggttcaaatattcttttgatgcttagtcacatgagaaaaatgggccctggagttttctcagtcagacaagtaattagcaaggagggaccagaacccaaattttctgattcctcatccattgctattttggttacactagaaacaaaatccaaagatggcattgaggtagggagaagttgacacagtatgaagaataagaacagtagaggttagagaaagtgagtgaaaataatgtagaaaatggcctaaataaatatagttagatgagtcctttcctcctaatttttatttttaatactttggaggactaacaggtatcatcctttaacatggctgaatacaaagctttaggagaactggtcctcagctattcatgtcttgtcctttgatttgctgacattcttttataggttatgaatctcttatggtttactttgtttctagcaatatctagatacatttgtgtatgtattgatgtatgtatgttttgaaaacacggattctccttttggataattcatagataaaaatacatgtaaagattatatatatgcatatatatgtgtgtgtatatatatacaatttaatttattatacagacgtatacaaatacaatttaattttacacacacacacacacacacacacacacacacacacacacacacacagaaagagagagacatttcatcctgccttggcttctcaaagtgttaggattataagcatgagccagtgcgctcagcctgtaatgaaatcttttatttccagtaatacaatggcaaaggacattagtagataacctaaaagaagaaattcaaattattgctgaaccttgttagactaattatttttatattttataattttaataattattagacaaaaatattttgaatatatatatatggggaaattattatgtatttgtaaaaaatacattggccgggcatgatgctcatgcctgtaatgccagcactctgggaggctgaggtgggcacttgaggtcaggagttcaagactggcctggccaacatggcaaaacctgtctctactaaaaatacaaaaaattagctgggcatggtgatgcgtgcttgtaatcccagctacttgggaggctgaggcatgagaagtgcttgaacccatatgtatatatgtatgtgtatgtacacacacatacacacacacacacacacacacacacacacacacacatatgtatatagctgcctcaaagtcttttatccctgatataatttatatattttatgtatggttgttttttgttaaggatagcaaactaggaaaaataaatatttttatttcaaaatcgttttaaaataaatagtagaattaattaaaataaaagtggcccattattctaccacttagttccaatgacaattgaaaaagagaagtagtacatgtatgtggttagaaaatgaaaagagaggctttttctagatcctccatctccttaatcctttaaggtaactactgtaagattttatatatctattctaccagaatgtttaaaaaatgtatttgctataatgtatgtgcacatattctttaaaaaagcaatttacatgaatttaatcattctatacacgttattcaacatgtttttctcacttaacatagagagcctaatcaacacatagacaaatctaaatcatttttaagggctaaagtttttgtattaatttaccataatttatttaacatgtcccttatgggtagacatttggttaattttcaattttttggctatttaacagtacagggtacatctattcacattaatggtaaaattttaaattttggtagttttttgacaaattgcctatgtacttctactactagaattttatacttctactaaaaatatatatacttttctaattttgtacatttttaatagtatatgagacacttgttagggctgggttttatcaaacattttatttttttattaatgcacataatgagtatttttttttgagacaggatctcactctgttgcccaggctggagtgcagtggcgtggtcactgctcactgcggtttaattttttttgtttttttgtagagattgagtctccctgtgctgcccagctggtcttgaactcctaggctcatgcagtcctccggccttggcctctcaaaatgttgggattataggcatgagccactgtgcccagcctgtaatgaaatttttttatttccagtgatagaatggggtggagtgcagtggctcatgcctgtaatccccagcactttgggaggccgaggcaggcggatcgcttgagttcaggagttcaagaccagcctgagcaacatgacaaaaccctgtctctacaaaaaaggagccatatgtggtgatgcacttgtggttccagctacttggtggctgaggcacaagaattgcttgaacctgggaggcggaggttgcagtgaaccaagattggatcgtgccactgcaccccaggtgacagagtgagactcccatctctgaaaaaaaaaaaggtaatagaatggcaaagggcattagtagataacataaaagaagaaacacaaattactattgaaccttgttagactattcatacaacactatgttaaactttgctagaaactataaaaaatacaaatcaaaacaagattctattttttacttttaagatagagataacaaaagataacaccagtgttgataaggatgtgggaaaagggtaatgcaaagcaatatatactttctggaggataatttcactatatgttttcaagaaacttaaaaataccttgtagcgtctgatcccataatgccatttctaaaaatatagactaagaaaatatttagaaaccagcataagaatgctcactgcagccttatgtctaaagcagaaattggtaacagtctataagcccagtaataagaaaactggttcatcagctatggcacattaattcaatgtacatatatgagcagcaacgaaaagatgcttagtgatgtcaagattttccttgtatgatttttaatacgctagacagaagaaaacaaagggaatatgctttataaaaatttttgtttattgtggctgaattgttaataatcctcaatgcctggggaacatttgctttgttcttgtttttattactatttagagatagggctttgttttgtcatccaggccggagtgcagtggcttgatcatggctcactgcatcctcgaactcctgggctgaagtgatcctcctgcctcagcttcctgagtagctaggaccattgatgtacgccaccaatcctagaaaattttttattttttgtagagacagggttttgctacattgcccaggctggtatcaaactcctcacctaaaacagtccttttgcctaagcctcccaaagtgctcacacctgtcatcgtgccttgcttgttcttgttattttaatattgggtcacattgtagagatatccttatatacacatgtatagaagaaatatgaaatgaaatacaccaaaatgtttctagtgcattctttgtgtaatagaattatggataatttaggctttttttggtactcctgaatattttgtagtgaatactcttactttctttttttccccttaggacattccaacctacctacttaccttccttccttcttatttatatttgaataagaaatactatcacatggctcaaagttgaaaaggtacaaaagggtctacagagaaaaatctctcactcctgtgcccagtcacttaattctcatccttggaagcaaccagtgataccattgttttgtgaatcctttcagaagtatttcatgcctaacatcagtttaatcagaaaaaaaaaggcataacaaacatatttaaaagaaatttttttcaagttaatttagggtatttggagctcttccgatttggacttctatctaagtctgagtcaaccagacttcgttgtgattgtagctatggtattgtctcaaaaaagacaaaaaattagccaggtgtggtggcgtagccagtaaaatcttagccttgtggctttaatgatgttcctcaaattctgagataagcttattttattccttctatgctaatattggttcacatttcagttatgcatatttgtttctagggaaaatcctgctatttttatcatggagttcataaaattagtgatcagcacacattacagactttccaagggatgtgcaaagcctgggatatagaagaacttgtcagcctggggaagaaactaaaggcctgtccatattacacagcccgagaactaatacaagatgctgacatcatattttgtccctacaactatcttctagatgcacaaataagggaaagtgtgagtatatgtgtaaaaatgagaaccttcttcctactcatggagatgtaaatgttgaatgtaaaagcttttagatgttttaattttttttgctttaatttatgtaaataaatttgtgtaaacatattagagtactgaaaacatatcctaacatgggttaaaatcaacccactcattttaatttccaaaataacaagcagttttaaggaacatagtgactgaagtgggattacagcaggatttctctttgcatttatgaatattcaaaaagaattatttagaaacatttctctgaaaaaactatgttttgaagaacttatgtgggggaataaaattatgccttgtgagctttgagaagtgaacttcagataatggcatttgtgtttgtttgcctggttctttttagagacatgcaattgttaacagcataagacaaaaagtgaataatttggcatagtcaattgttattcctgtcttcagatctgactgcacaattcatctcagctttctatttctttaagatccaaattaataggcattatgtttactaccccttctatcctacctcttatttggttatctcttaactagatctcttccttctgagacactgtgcatatcaatgccaggtcagttttccaaatattgcttttattacatccttttatctgcctaaaaatctattgcttcctttgctcatgagataaagttcatatttcttaagcttacactcaagatgctcaatagtctgacctggatctgcccaatttgaatccttcaaaaattacctcatactcccttgaggataccttgttctttactctatctttgcttttgatgacacctctttggaatgccctgtccactctttgtctgtccaaatccaaatcctacttatcttttaaaccccaatatatttcctactcttccatggttttttctcaacttttcagctgtctgtgtattcttacttcctcaaaataactcattgacaattgctttgtgacagttccttgtattagtcagtactctttctattgcaagtgacacaaacctaccctaaaaaatgcttaagaaaaaatacttgattctctttattgtgatggctttattctcaggcaagttctcactcttgcttatggaacaaagataaccataagcagctagctcacctggagaaaagagcatggccacatattagtccctccaaattactctggttggcctaccgtggatcacatgtctgttcctgaacctgaaccagtcactgtgaccacagaaggatggaatactctatttaactgacaatcctgggccttacccccattgtgaaagtggtgatgtcctttgattcacaggttaatagtcctgccagcatcacatgggagttggagaagaacaattctccaactcccatgttggagaaggattgcaggacagattaaaacaaaacatatatattatgttagtattttaagagtcattttaatcttgtattgttattttacttttaaaggttttatgcttttaatcttgtattgttattttacttttaaaggtcttatgcttttaatcttatattgttattttatttttaaaggtcttataattagtttgtaaaattatgttggaaacactttcatagtgggattttatacctttctgtgtagcctgtggtaccttgatccagactcactgacatatttttgttgctgtcgataggtttgcaaagtattttaagagtaaaaaaatggcaaacacaataatgtagagctgatatttggttggccatagtgcttcagaagttttatttaagacctagaatctctgttgcttatgtaattgcatttgcaatattggcctatagtgtgaattttaaaatgaaatatcttgcctgctgttgttaaatctattttgccaaatgttttacaagaaaattcttttatcttatagatggatttaaatctgaaagaacaggttgtcattttagatgaagctcataacatcgaggactgtgctcgggaatcagcaagttacagtgtaacagaagttcagcttcggtttgctcgggatgaactagatagtatggtcaacaataatataaggaagaaagatcatgaacccctacgagctgtgtgctgtagcctcattaagtaagaagatttgtctattagtgtatttgtgctgcctttatatgaaaaatatgtttgattatgccagagtatttaaagttagtaaactttggttaactaggcttcttgggaaatgaattgttccttgccagttaagctttaaaaacaaggctagtccaaccttttgtcttgttcacaagaatataatgaacataagtgatttttaaaaatgaataattgtgaatcttattcctaatttggcaggataacataatagccccgaaggatgtgtctaggatattgaaccagaaactaaacgtgcttttaattaatatattttaaaattctggatcatggctttaatttattgctttattctccaatttaaataggattctagtttcatgggttttaattaatcaagatttcagtactctaaaataatatatttagtactagctttatgacaatttacactaatttttcttttattagacattaagttgttgatctagaatcttgttaccatagaaaaaaacttcccaactctgaatcccatttcatttattgtagcatttttctgtttccttcacatttacactttaaaaaaatttgaatgttacacagtcacatggtttgaagacaaaatgtatacaaatttgtatagtaaaaacctccttccagttccatccctgatctgtttaatgtctgtgttctcctaaacaagtttatcattcaatgcatattactcatttatgaaccaatattagatatattttcttgtccctcactattttccaaatgatggcatagtatacatacatttttctgcaacttgcttttttcaattcccagtgtattttggagacctttccatgttaagacctagaaagctttctcagtttaaaaaaaaaatagatatctagaattccattagatagatatgcaatagtttatttaaccagcctctgattaatagaggaggttgtttctagttttttgctcttaaactgctataatgaataactttgaacatacataatttcatttgtatgcaaatatatctataggaatctttttagaagtggaattgttgggtgaaagcatagacatatttgtaatttcaatagatatagctaacatttacacaataggtggatgacaggggggctaatgtatgcttctaccagcaatgtataagagtatggaaattgttttcttctagcctgctaggtgaaaagtggtatcccaatgtagttttaatattcattttccttaatatgcatgaaattaagcatctttaaaggccatttatatttccttttgtgtcaactgcctgttgacatctctgtcctttttttgttcttattgtggttctttttcttaatgatttatagaaccccattcatatattagggaattaaaatctttgcctgcaataagagttgtaaatactttccaccccattttgccatttgtgtcttttctggtggtgttttgccatgcagatttttgtggtttttattttacagcataacttgttgaaagagttgtctgtagttgctaattctattttctcacttgacattcttccctcatcgatcttagcagtgttgctctctggacaattctacgcaaattgttttgatcaagatcactagtgatctctatattgccaaatacagaggttattgtttcttttatctcagccagtcagtggtgttgggtagttgatgactacctctttgaaaagcatttttgtcttagcttctgtgacatctctgattttcctccttctcacagtccatttttttttatcatttcttttgataattcttattctttttgatatctaaatgttggggtgcctcaggacttacttggtactgggacctagtttcttctgtagttctattttccctaaatagtttgtagtatcatagcttagaatataatcttcagtactggtgaggcctgaacctatgtctctagcttcagcctctccctagaatgccattcttatatccaactatctactttatagctctttttgtatatcaaaatagacatttcaactttacatctaaaacagaattgcttttcttcctgtgttctgttttctccccagtcttcctcatctaagcaaacagtatgtaccagttcctcaagtaaaaaagttaaatactatccttaataatatccttactgcctcacctcatccaattaatgagtaagtcttatagatgccacctgcacagtatatccccaattcctcaatatcattgattgttcatatctatcatcctacagtcttctctcaacaaggatattataacaacctcctaacaggtctctactttcactcatctttctccagtaatcaattctagcttggtagctagaatcattttttaaacatgtaaaatagatagtctgtcttttatttaaaactctgtatttaaaaccttcccaccaaaacagcacagtactggcataaaaacagacacacagatcaatggaacagaatagagaactcagaaacaaatccacacacctacagtgaactcatttttgacacaggtgccacgaacatgcactgagggaaagacagtctcttcaataaatggtgccgggaaaactggatatccatctacaggagaataaaacaagacccctatctttcaccattaacaaaaatcaaatcaaaatagattaaagacttaaatctacaacctcaaactatgaaactactaccagaaaacattggaaaaactctccaggacatcggtctggggaacaacttcttgagcaataccccacaagcacaggtaaccaaagcaaaaatggacagatgggatcacatcaagttaaaaagctgctgcacagcaaaggaaacaatcaacaaagtgaagaggcaacccacagaatgggagaaaatatttgcaaactacccatctgacaagggattaataaccagaatatataaggagctcaaacaactctgtaggaaaaaatctaataatctaattaaaaatggacaaaagatttgaatagacatttctctaaagaagacatacaaatggcaatcagacatatgaaaagtgctcaacatcattgatcagcatttctctgctgatcaaaactacaatgagatatcacctcaccccagttaaaatgacttttatgcaaaagacaggcaataacaaatgctggcaaggatgtggagaaaagacaaccctcgtatactgttggtgggaatgtaaattaggacaaccactatgaagaacaatttggaagttcctcaaaaaacttaaaatagagctaccaaacgatccagcaatcccactgctagatatatacccaaaataaaggaaatcagtatatcaaaggtatagctatactcccatgtttgctgcagcactattcacaatagtcaagatttgaaagcagcctaaatgtccatcaacagatgaatggataaagaaaatgtggttacatatacacaatggagtaccattcagccataacacagaaggagatcctgtcatttgcaacaaaatggataaaattggaagtcactatgttaagtgaaataagccaggcacaaaaagacaaatatcacatattctcacttatttgtgggatctaaaaatgaaaacaatttaatccattgagatagagagtagaaggatggtttaccagaggctggcaagggtagtagatggggatcacaggggaggaggggttggttaatgagtacaaaaaaaagaaaaatagaatgaatgaataaggcctagtatttgatagcacaacagtgtgactatagtcaataatgatttaactgtacatttaaaaataactaaaagaatataattggattatttgtaacacaaaggattaatgcttgagaggatggataccccatcttccatgatgtgattattacatattgcatgcctgtatcaaaacatgtaccccataaatatatacacctactatgtacccacgaaaattaaaaattaaaacccaagccttcccattgccctttgaataaattcagatttcttatgatgactcaagatgactgatttctgcttatcactctgacattgttcataccattattcatttttgcccattgtgctgcaaatcatattggctttctttcagatcctcaaacaagcaaaatttgctaaccacctcaggacctttctcctagctgttccttctgcttggatatttcttttcttctgattctcccatgactggatactttttgcattcagttattagaataaatgtcacctcagggagagcattcttgacattaaaattaaagttgcaactaggttatattaaactaatttattttcataatttatttgtatataattacctgatttttttttcattttattagaacttttttttttaacttttaagttcaggggtacatgtgcaggtttgttatacaggtaaacatgttatgggggtttgttgtacatattatttcatcacccaggtattaagccttataactcattagttatttttcctgatcttttcccgtctccaacgctacaccatccgataggccccagtatgtgctgttcccctcttgtccatgtggtctcatcatttagctctcacttataagtgagaacatgcagtattttctgttcctgcattagtttgctaaggatatgatctccagctccatctatgttcccgtaaaggacatgttcttgttcttttttatggccatatagtatcccatgactacctgacattttcttgtttatgtatttgttttgatgtttattcctgtctccctttagtagaatgtaatttccatgagagtaaggaccttgcctattttatttaactgctgttattttcactacccagaacaatgtctggaataaaataggcattcaaacacttaatgtatgaatgtgtatatatatcaatgaatgtatttatatattttctagtaattctcttttttgtgttaatatgtaacactttaatttctttattaggttgttttgcatttccttttatatatatttgggataagtacctaagacctggctctcagttgaagagacattagctaagtaaagcaatgtgaatccacaaaacaagtgggaaatcatatgcatgtttgtttcttctgaataaaagctttcttttcagttatataaagtttattttgcaatatgagacatgaatgctttttaaaaggtgtcttaattaatccacattcatgtcctaagaatgtcaagatatacagatcaacgcatgacaataatgatgattctcttgttctgctgaaatagtgtgtgtaaggatgatactggttgacacaattgttttattttatttcagttggttagaagcaaacgctgaatatcttgtagaaagagattatgaatcagcttgtaaaatatggagtggaaatgaaatgctcttaactttacacaaaatgggtatcaccactgctacttttcccattttgcaggtaagatattttttctacctgtgaaacgtatttagtgaattagaagtgatttagtcgtgactaaatccagattaaatctagtgagtaacccagaattgttaaatatagcaatttaattttttaaaaattttattatctaaatttgataatctttaagtgatggcatgggtaaattgtgggtgaaaatatagcattatttagtttgaaggaaattagtctttaaagggattaattgctttgtttaaagctaaaaggagtcaatatttttaggttgtagacttacttagtcaattgtaaaagttaaaattttagaaaataaaaagaggagaaattcctattttgttcatcttaatttagaaattataaacctgatattcatggagagatcatgagtaggctttggaagactatgaaacttatgaagctatatgcaaaattttatgagcgtatccttttgtacatttttctaaatagaggctgcataaatttcattatattttctaatgttttttgccgataagaatatattttctttttttgttgctatttacttatttaaattaatagattatgtattttagaatggttgttttaggtttagagaaaaattaagcagaaggtccagaattctcatatactctcactcccagctacacacctatacacatacacaatacacaccaactccatagtttccccattattgacctcttacaatagtgtagtatatttgttataattgatgaaccattattgctacattattgttcattaaagtccataggttaccttaaggtttaccccttgtgttgtagagttcaattaggttttgcctaggaatccaccactacagtatcatacagagtgtgttcactgtcctaaaaatcttctgtgttacacctattcatccctccaccacaccacgcccacacccaccaaacccttggcaaccacagattttttttactaactccattgttttgccttttctggaatgccatatagttgaaattgtgcagtatgtagtcttttcagactggcttctgtcttagcaatatgcatataagattcctccatgtatttttttgccttgatagctcatttcttcttatagctgaatgatatttcattatttggatgtaccacagtttatccattcacctactgaaagaaacattgatggtttccagtttttggcaattgtgaataaagctattataaacatttctattagtgacaagctttctactcatttggatatttacttaggaacacaattgttgtattatatggtaagactgtgtttagctttgcaagaaactgctaaacagtcttcaaaagtggctgtaactgccgggtatggtggtatgcgcctgtagtcccagctacttgggaggctgaggcaggaagattgcttgaacccaggaatttgaggctgtagtgcactatgattgcatgcttgtgaatagccactgctctccagcctgagcaacatagcaagactttgtctcttgacaaaaagtggctgtaccattttgcattcccaccagcaatgaacaaaagttcctgttgttgtacatcttcaccagtgaactttggggctgaggactctgcttctacgagtacaacttttttagatgacacatatgagtgatagcatgcagtatttgtctttctatcaggcttatttcagatagcataatacttccagtttcatccatgttgttgcaaatggcaaaattttcttcttttttaagactgaatatttcattatatatatatgtgccacattttctttatttcattaatcactcactatattctcacttttccccatgggaagaattgtgggctaatggaggctctcttggcactgggctgtacttccatggggcaggggtgatgtaggtaatatgaaactatactttttgccctcttcaatgcatctgttcttggattttttgctccaatggggtcctggaacttctctgctagactcttagactcttaacaaaggtactctcatgtgcgagtggttgtcagaattggttcattgttgggagatgacaatggaaaactcaaattcttttttttttttttttttttttgagatgaagtctcactctgttgcccaggctggagggcagtggcgtgatctcggctcactgcaacctctgcctctcgtgttcaagtgatcctcatgtctaagcctcctgagttgctgggactacaggcatgccccaccatgcccggctaatatttgtatttttggtagagacagggtttcaccatgttggccaggctggtgtcaaactcctgacctcaagtgatccacctgccttggcctcccaaagtgctgggctcacaggtgtgagtcaccgtgcctggctagaaaactcaaattcttccatcttgctgatgttatttctcaaagaggtttttgaacaaaaaaaatgatgaaaataattgccaacatgatcacaatagtattcggggcatgtgactattaaaacatatattttaatcaggatatacttaaatttttgccctgcatttataaaatgcagcgtggtatctattgtaagaatttttccatattgtgacatctttcataatattttttgcataaattgtttgcattttgaaagctacttatataacagtaaaatggggctgagggtggtggtgcatgccagtaatcctacactttgacaggctgaggctggcggattgcttgagcccaggagttcaagaccagcctgggcaacaaagaccctgttgtctacaaaaaattagctggtgtggtggcatgcgctgtagtcccagctacttgggaggctgaggcaggaggatcacctgaacccaggaggttgaggctacagtgaaccatgattgcaccactacactccagcctggggcacagagcaagaccctgtttaaaaaaaaagaaaaggataaattgtagcatattcatatagtggaatactacatagcaataaaaaatgaactgcttccaacacaaccatatagatatatatatatatttttttgagatggagtttcgcccttgttgcccagactggagtgcaatggcgtgatctcagctcaccgcaacctctgcctcctgggttcaagtgattctcctgcctcagactcccaagtagctgggattacaggcatgcgccaccacacctggctaattttttgtatttttagtagagacggagtttctccatgttggtcaggctggcctcgaactcctgacctcaggtgatccgcccaccatggcctcccaaagtgctaggattacaggtgtgagccaccgcacctggctctagatgaatcttaaatattatgttaggtgaaggaaaccagattcaaaagggtataaactgtataaatctatttttatgaagttgaagaacagacaaacctaattatggtgacagaagttgaagtactggttacaactatgtgggggtttgaagcagtttgggctgagaaggggcacaaaggaacatctgggattctaggaatgttttgtatcctggtcaggtgttagttacatggggaggtgtgtgtatttagtgaggtgtacatgtaagattagttcattctactgtatatgttacatgtcagttataaaatgtacaaataaaatgtatgtcaagggaaaaaaactggaaaatacagaatggcacaaagaaaaatgactcataaactcaaagatgaacattgtgaacattgtgatttatgtctacttatgccttcttctatgcccatatttgcttattataaatatatttctgatatgacacatttgttttaccctcttttaatttaacaatatattgtgtatactttcctatttaagtaaagattccttcacataatttttaattgcggtgtagcatttttatgagtgtacttattctaaattgattaatctgataagttgaaatataggttatttccagtttcccagtataataaacagttctgatatgaacatcccttatgaattgtggtttttgaatttactttaagcagtcttttcttatcctatgttatatttctcctaaaaattttaaggtatttattgtttataaaggatgggatttataaatacttttacaaagccttggattcattttgtttatgttgtgaatttatgaatcaatttttttcctgtatggatagagaattgtcccagcactgtttcctaaatagtgcatattaatttccctctaatttgtaatgctacctctgctacctatttttctttttttaattaaaaaaatattttttaactttttttttttgtttttaagagacagagtcttgctgtgttgcccggaatgaagtgcaatggtgcattcatagctcactgtaaccttggatttctggtcttaagggatcctcctgccatagcctgctcagtagctgggactacaggcatgcattaccacacctggctaattacttatttttttatttattttgagacagaatctcactctgttaaccaggctggagtgcagtggtgtgatctcagcccactgcaacctccgcctcccaggttcaggcaattcttgtgcctcagcgcccccaagtacctgggaccacaagcatgccaccacacctggctcattttttgtatttttttgtagagacgggcttttgtcatgttgcccaggctggtctccagctcctgagctcaagtgatccacccgcctcggtctttcaaagtgctaggattacaagcatgagccacccgtgcctggcttaattttttttatgttttgtagagacagggtctcactatgttgcctaggctggtcttgaactcctggcctcaggcgatcctcccacctcggcctcctgaagcactgggattacaagagtgaaccactacacccagtccctctaattttcatatatgtgtgaatttatatctggacttgattgtgttccaccattctgtttctctaatttgtcacatttgttaattaatgatttaagaaaagtgcttatatatagtagggcatatccctcactttattattttcctttggaattgtatcagctgtcctttgttttactctgccatttgaattttagaattagcttataatctctaggaaaagttctgttagaatttttattgtaattgcactgtatttatagattaatttggaaagaattcatgcatttacattatgaagttttcccattcatgacaagatatagttcttcattattttttcctatctttcaataaaattttataattttatttttaaaagattagatggctttggttagatttattcatgggtagcttaaagtttctgtttccattacaaatgatatatttttaaaattacatttttaattgttattgctatataaaactggtgtttgatttttatatatttatcttataattgtcttattaaccaccttgttgaattattttacaggtttgcccacagattatcttaaattttccatgtagataaccatattgtctgaataatgaccggtttctttctttctcatttctttctatttcttcatgtttttatttcttactatgctgtctcagacttccagtgcgttgtttatcacaggcaatgaaaaagacatcctgggccaggcgcagtggctcacgcctgtaatcccagcactttgggaggccgaggcgggcagatcacgaggtcaggagattgagaccatcctggctaacacggtgaaaccccgtctctactaaaaatacaaaaaattagccgggcgtggtggcgggcgcctgtagtccccgctactcaggaggctgaggcaggagaatggcgcaaacctgggaggcggagcttgcagtgagccgaaatcgcgccactgcagtccagcctgggcgacagagcgagactctgtctcaaaaaagaaataaaataaaataaaaaaaagaaaaagacatcttggttttgttgcttaaaggaggaattactagtattgcaccctttattgagatgtttgctgtgattaaaaattcttttttaattaacagctctattgaggtataattcacatgcttaaaatttacctttttaaagtgagttctgtgggttatttttatattatatatttatatataatatatagtatatatattatatattttatataaatattttatataaatatatatactatatatagtatataactatatataatatattaatatataatgttttatatatttttatatattttatatagtatataatatatttttatatattttatatagtatataatatatttttatatattttatatagtatataatatatttttatatattttatatagtatataatatatttttatatattttatatagtatataatatatttttatatattttatatagtatataatatatttttatatattttatatagtatataatatattatatattaatatatttattaatacataaacatgcaatatatttatatataattatatttataaatttatataaatttatataaatttatttataaataaaattataattttataaaattatttataaatttatataaatttataaatataaatataatataaatatattatatataaatatattatatataaatatatatttttatatttacattatatataaaatatatttatatattaatatattaatacatatatgaatatatattttatataaatatattatataaaatatatttatataaaatatataaatatataatatatactatattatatataaatatataatatataaaatatataatatagaaataacccacagaactcactttaaaaaggtaaattgtaagcatgtgaattatagctcaataaagctgttaattttaattcaattcaattcagttaattaaattaaaaaattaattagagctgttaaataatatatatattatatttttattatattatatattttatagttatttttattggattaaggaaatttgccctaattctagttggctaagacattcatcattatgattatcaatatttttaggaatttttaccaaagtagtatacctatagaatataaagagtcagttctgttgagaaaagcattcctctgacccactcctcaatcccaattctcactttggagtgcacttttatctcttgtagtggtttcttctgatatttaaccacatttaaaaaaataacgtgggttctgcttctttggagttttcaattttagatgttgtctgttgactttctgttaagtataatgatgatttagctcctttagacacgcacacactcacacacactcttctctctctgtcacacacacacacacacgctcactcatgcgctctctcttcttcctttgcttcctgcttttctgcccttctttcttctctctcttcactctctattctgccagtatagttatattgatattcagcgtggatatcatcacgtgtatgtattattatagcccatgatagtaatgcatgtagcttacttgattatatttttatacagctttatgtatgtttcctaaggaaccataattaactttttatttatttttccattgcttagttttctatttttctaccccccccaacccagctgccaatgtgtaggtaagctaactggaattgagctcggagtactctaataattgaatatgtaggatttcatttagcccttctgtttttagtacagcgcctcacctttagtagtttatattttctatattttatcagagtaaattgccagtgttctgccagtgttggagaaggatattaagctttgatataaggtgttgctgaggggacttcatttttcaaaaagaataatttgatatttgtatttcattgcagggctgaatatttttccaagttcatgttgtctttcttgtttgttctttgttggtttgttttttaagtctttctacttatttgtattctgtaatgttttgttcagtgaaggctgatttttactcttatagatttgtattgtttcatgatatatctgaatattaaaatgtatctttcttatttatcctatttccccattttattttcattgaacacattttattgtcagacatcagagttgtcaccaatatcttttattgcttcagtattcagaattttctcttttacaatgtggggaacatactcttctgttttcttataattttgttttaatgtccacactttcatccatattaaaacttatgagccatgtaaagaccaaagaaccagttaacatacattttgttatttagcatgtattgtttccttaagtcatttagttttgcttgtgatgtagtcatattattctcagcatcagaattactttctggaaataactcatggatttaaggcaacatatcaactctttaaagccttttggagaagccatttgctacatttttatttaattccttacatctgaaaggcaccaaataataccctgattgaatcttctaaatacctaacttattattaaagagtctttgactctgaggagaattttgctaatatggcaatctaaaatatattgttagcattgtgctgttaataattgtctttgtttgtatcactataaatacctgaggctgggtaacttacaaagaaaggaggtttatttggttcacagttctgcagcttgtacgaagcatggctccagcatctaattttgaggaccttagcctgcttccactgatggcaaaaggtgaaggggagctggtttgtacagatcatatggcaagagaagaagcgagagagagaagggagggaggtgtcaggctctttctaacaaccagctctcgtgggaactaacagagcactaactcaccccctctctacttagggagggcgttaatctattcatgaggtatctacccccatggtcccaaacctcctgatatgccccacttccattactggggatgaaatttcaatatcagatttggagaagtcagactatcaaactatagcaattctgttcacctaaaatttcaatgcatgttttgttgggtttcattgtatttttgagaagtttctttttccaattccctcccaacccctctatacttaatatggtaatttcttatagggacatttttctgctgttcttcaaaaagaggaaaaaatctcaccaatttatggtaaagaggaggcaagagaagtacctgttattagtgcatcaactcaaataatgcttaaaggactttttatggtacttgactatctttttaggcaaaatagcaggtaagtgaagataactagtatgtattttccttttaaaaatagcctaatttggatgctagcatgtgtttaatacatacctattttgggtgagtaaataggagaattgaaaacaagtgttatagatattattatatatttgctcttattgacacagacttagaggaattgaaattagtctgatgcttttttgagacagggacttctctgtcacccaggctgaagtgcagttgcatgatcacagctcactgcaactttgacctcctgggcttaagcaatcctcccacctgtttcctgagtagctgggattacaggtgtgcaacacccacacccagctaattttttaatttttattttttttgtagagatgagatctcactatgttgatcaggatggtcttgaactcctggcctcaagtgatcctcccacctcagcctcccaaagtgctaggattgtaagtgtgagcccatgcctggccaaaattagtcttttatattaatgaatattgaaatcattaaataaatatatttaattaattcatattaaattatcttctattgctaaagttttcttatgttcctacagtgtcagaaagtcccttttttattgtatgaactgtggaaaatgaaaaacaaccaatccctctcatcctgtaacttaaattatagtagtacctagttctggtattttttttttattgtggtaaaatatacataaaatacaccattttaaccattttacgtatacaactcagtgccattaagtacagtatatttgcaatgttgtacattgtactcatttccagagatttccagaaattttttattattccaaataggaattctgtacccatgaaataataacccctagagtctttcccctcatcacctgctaacctgtattctattttcatcttatgaagtcctttctaggtatttcacataagagcgatcatacaatgtttgtctttttgtgtctggcttatttcaattcatttggcacagtgttttcagagttcatttatgtagtagcatatatcagaatttcattcctttctatggctgaataatactccattgtatgtatataccacaatttgttaatttattcttatgttaatggacatttgggttgttttcatcttttgcctattgtaaacaatgctactatgaacgttggtgtacaaatatctgagttctgctttcagttcttctgggtgtatataagtacctagcagtggaattgcagaatcatatggtaatgctgcatttaactttttgaggactcaccatactgtttctcacagcaactgcattattttccattctcattatcaatgcacaagggttccaatttctacacatccttgccaacagtttatgtagcagcatatatcagaattgtttttgctgacactcgttattttattttttgtataatagccatcctaataggtatcaagtgatatcatctggtttttatttgtatttcctaatgactagagaagttgagaatcttttcatgtgcttattggccaattgtatgtctttttttggagaaatatctattgaagtcttttgcccacttttgaattattgggtttttttgttgttgttgttgagctgtagttatttagatattctggatgtcagtcctgtaagagatatatactttacaaatattttctctcattctgtgggttgttttttcatttattcatagtgtcctttgatgcagaaaaggtttttaatcttgttgaagtccaatttatctttctcttttcttgttgttgcctgtacttttagtgtcacatccagtaaatcatggccaaatctgatatgaagatttcccctatgttttcttttcctttttttttttttttttctgagacgggagtctcgctctgtcacccaggttggagtgcagtggcgcgatctcggctcactgcaagctcagcctcccgggttcatgccattctcctgcctcagcctcccgagtagctgggactacaggcgcccgccactaagcccggctaattttttgtattttctagtagagacggggtttcaccgtgttagccagaatggtctcgatctcctgacctcgtgatccgcccacctcggcctcccaaagtgctgggattacaggcgtgagccatcgcacccggtctcccctttgttttaagagttttacagtttttggctcccagtatttttataagattctctccacagttgttaagttcccaactttaattttgagatctaatctctctaggagtgaaatgaataaggaaatactatagcgaagacatggtagagaatatcacattttacttttttttttttttttgagatggagtcttgctccgtcacccaggctacagtgcagtggcgctatctcagctcactgcaacctccacctcccgggttcaagtgattctcctgcctcagcctcctgagtagctggggttacaggcgactgccaccacacctggctaatttttgtatttttagtagagacggggtttcaccatgttggccaggctggtctcgaactcctgacctcgtgatccacctgcctcggcctcccaaagtgctgggattacaggtgtgaaccaccgcgcctggccacattttattatttttaagcttaaccattttctagattcttattgaaagcagttatacactggatgggatcacagatatcatctggttcagcaccttcattaaaagtagatgaaggctgagactcaggtttcaaaggaatgtaagaattttataacttgttgctaatactttaaaaactttcagtaaaaattatccttctattttctcatttaataaaaaagtataacccaccttttagtctctttaaccataatactgttttctattttgtaactcatcatgtagtagagcatgcagagagctctggactgggagttaggaggcctggattttaattctgcttctgccatgacatatgtaatgtttgaaaatgaggttaggaagtagctgataaaagatagatggttagatgatttctaatattccctctgagaatcagttgattctatgattaatggctttattaatatcagaattactgaatttaattaatggtaaggagaatgttatttttgaatgggaaggtaccagctctttcaaatgagttttaatgtaatcagtttttatattgtatgtagctgggtcataggttttaaaagttttgccacttaattagcactttctttgcatctagatttgcagatgattataaaattgcgattcaacagacttactcctggacaaatcagattgatatttcagacaaaaatgggttgttggttctaccaaaaaataagaaacgttcacgacagaaaactgcagttcatgtgctaaacttttggtgcttaaatccagctgtggtaagctcatcatgtaaatggaaattttgtcttcttgctcagtaccagcattttaataaatgtggttgactcttttaaagatagttgtttgttgttgttgttgttgttgttttgaggcagggtcttgctcttcacccaggctggagtgcagtggtgcaatctcagctcactgtagccttgaccttccaggctcaagcgatcctcccaccttagcttcccgagtagctgggactataggcatgtgtcaccatgcccggctaatttttgtattttttgtagagacggggtttcaccatattgcccaggctggtctcagactcctagactcaagcgatcttcctgcttcagcctcccaaagtgctgggattacaggtgtgagccactttgcccagcctcttctaaagataattttatttatctaatgttgttttcttttaggccttttcagatattaatggcaaagttcagaccattgttttgacatctggtacattatcaccaatgaaatccttttcgtcagaacttggtgttacatttactatccagctggaggctaatcatatcattaaaaattcacaggttagttgttgtttttttttttggaaggccttcagtgtttctacttcaatataactatgtaaacaagttagaagatacctgaagtgccagcaagtaaatcttggtaggaaattcaacattccagttttacaataaaagaaaatctgtcagctacttaatgatgtgtcaacagaaggaaataatccagtcacttgggatgcaaaaggctgtatttcagcttcttcttctaagtaagttttagttttgtaatgaaaacaaaattttgatttctttaattctcattgtataattatgttttatttattgattgattgatttttgagacagagtctggctctgttgcccaggctggagtgcagtggtgtgatcttggctcactcgtgtttaagcaattctcctgcttcagcctctcaagttgctgagattacaggtgtgcgccgcacgcctggctaattttttatttttttggtagagatggggtttcagcatgttgtccattctggtcttgaactcctgccctcaaatgatgcacttgcctcagcctcccaaagtgttgggattacaggcgtgagccactgtgcccagcctatttatattttatttattttatctctgtatttttatttttacttttattttttgagacaaggttttgctctgtcacccagactggagtgcagtggtgcgatcttggctcactgcagccttcgcctcctgggttccagcggttctcctgcctcaaccttctgagtagctgggattatgggtgtatgccaccatgcctggcacatttttgtatttttagtagagacggggttttgccattttggccagactttatctttttagagacaaggtcgcttgctatgttgcccaggctggcttcaaactcccaggctcaggcagtccacctgcctcagcctcctgagtagctgggactacaggcatgtactaccatgcccagcttgtataattatttatgcttctcttttccattagactacagtgtatcctgattcttccttttacatccacgttcttcctctgtgcctagattaatagctggtatttagcaagtgttcagcatgtttgaatatctgaaatgagttaaaagtactcttatgagtcctatgatttaagattttaatgttttataacgatggctactaaatgttattttaatttttgtggaaatgtatagattgttatttttcattatgccttctggtttctttttatgaaatattttaaagtggttaggcacacaggtgatgttaagctgtggttaatgctaaagtggttaagttaacatcacctgtgtgcctaacacaatgctagctctttattaagctatatacacaggtttataggtgggaacatttttggtcctcacaattacttgggagcaactacggcatttggtagttgggaacctagaatgctactcctatgtaactaagaattgtgctttccaaatgccagagtgttcctgctgagaaatgtgactatgaacagcagtgaaggaagaatacatgttccacgttttcaagttgctttctttagagacacagataaatatgggaagttggtaaattcagcatacgttttctcataagaatgttattacaggctctatgttctcagcctactgcacaaaagtccatttaacctataatgtcgctgaattataataatgtagttgtgcagctggattctgttacactgtaatattttccttcaacttaaaatttaaaaaacttttaattgtggtagaatatatataaaatttaccatcttaaccatttttgagtatacagctcagtcttattaagtatgtatatgttgttgtgcaaccaatctcaagactttctcctcttgaaaaactgaaactctgttcccattaaacaacagctctctattctccccctctcctcagctcctggtaactaccattctgctttctgtttctatgaatctgattactataaatacttcatataagtggaatcataaaatatttgtcgtttttgtgactggcttattttacttagtaatgtcctcaaggtttgtccatgttgcagataatgtcttcaaagttcatcatctatgttgtagcatgtgccagagtttcctctttaaaggtgaataatgtttcttgtgtgtatatgcctgtgatttataatatatatatttggtcttccactccatttcctggcatacaactcctaaaatccttagaatctccaaagtgacattttgtatgctaatgagatgactaatggtagggggctcctaggtagcatcaggatcagggctggcctccgggaagaccaagacatgataggagagttgggattttcacccccattcctcaacctctggggagggcttgggggagatgatgctaaaggttaagtttatcttaatggccagtggtttaatcaatcatgcctacataatgaagcctccataaaaacctagaaggacagggttcagagagcttccagatagctgaacacttggaggttcctgaacacttggagggtgatgtgcctgggaattgaagctctgagccccttcccacatacatctctttatctgtatcctttgtaatattttttctaataaatcagtaagtgtaggtaaatgtgtccctgggttctgtgagcagctctaccaaattaattgaacccaagcagagggttgtgggatgcccgatttctagctgatcagtcagaagtgcaagtaaaaacaactgtgactggccacagaaatcaggggcagtcttggggactgagccctcaacctctgggatctgaagttatcatctcccagtagatagtatcagaattgaattgaattagaggacacccagttgatgtctgttgcagaattgattgcttggtatgtggaaaaaacctcccacacatttggtcacagaagttttctgtgttgattgctgtggtgtgagagcaaaggaaaaagtttgtttttttctactcaatgctacattttgatcattcattcattgattctttcaactgtatttcaaaaaattagaaatttcagaaaagttggaaagataatattaatattgtgaatatctttatatccttcacctagattcatcacttgttaacattttgcaaaattttcgtctctctccctctctctacatataagggagatagaattgcaaataactgtaagatgtggtgggtgtgatttttttctatgactaaggatctttgagcaccaatgaatttttgaaagagtagttcctgtcatttttgagacttgcctatggcaaattatactggccttcatccccagtattttggaattatctgattctgctattggtatatattcatcatttcacttgttcatttattcacctaacaaaaatttgttacatgcttaaattttgcaaagctattaagtaaacagagacaggtacaacctgttttgctttcaaagaattttcactctaagagaatttagtgatctgcctaaagcaaaacatttataaattaaatctgtatacagttaattgaaggtaatagaaaaccccctgacaatttaaaaataaattgttaaacttgttgcttgatcttttatgtacatacttccaaataaatactaatttccatgcctttttcaggcataactctaataatgacatattcatattctaggtttgggttggtaccattgggtcaggccccaagggtcggaatctctgtgctaccttccagaatactgaaacatttgagttccaagatgaagtgggagcacttttgttatctgtgtgccagactgtgagccaaggaattttgtgtttcttgccatcttacaaggtaagggaatatttattgtttcttttgcctttaaataatcatttacattttaaacattggcatgctaattttaaaattaccacagtaagcttcctagggtagaggcaacaaggtaataactatagttttctaaacatcacatattattttacttattttttgattaagatactgcctgattgtcctacctctgttttacttaaaagtctgaaagagcaaggctggacgtggtggctcatgcttgtaatcccagcaggttgggaggctgagctgggaggatcacttgagcccaggagttcgagaccagcctggagaacatggtgaaactctgcctctacaaaatacaaaaattagctgggtgtggtggcacacacctatagtcccagctacctgcgaggctgaggtgggaggattgcttgagcccaggaggttgaggttacagtgagctatgattgcacccctgcactccagcgtgggcaacagaataagactctctctaaaataaaataaaataatctgaaagaataaaagtcttcaagcaatgttaattatataggagaagtgtttatgtgtacatttttattcttagggacaagtcgatattttcagagtagaaagaaacagagcattcttttttattttcataaattacatttctgaaggtttcattaaagttaatctaagccaaactttcttcgttgccctcattttacttcatgtatctggccagaagaattttgttgttgtttttagagtcactgatttttaataattttttttagttaatttgaaattatttagtatattttggtcctcctaacattcaaagcattgaaaccacttataattcctgaaagtaacatcacattgcatcaaaatctaacctaaatccaatgtagagaagtggcgttcccttctcttttttccacaggaagttatacctctaaggacagaagcatttggaagtaatatatttgaatgacaatattgatacttttgactcttctactgtctttttatatatatgtactttgatagctagggatacactaaagcaattagtctcttgtagataaattaaaggatttgttttcaaaaacatatttaatcagataattttttacaagaatatctaaaaataaaacggacataaacattttttaaaattcttaatggaaaacaagatttattccagtgtgaacatctacaccaaacagttatatttaggaaaactagtaattaagcttgatactaagtcatacaataaaacttgtagggagttggtcttacctaataaaatttttaggacttttaattcttaaatatggagacaaatatcttccgggaaattggaagaaaagttatttatgggattatggaaactgtactcactccacagttatgtaagcgattaaagcaaaatcttatttcattgctaaaacctttttatattttccagtcatagtcacaaaaagggagataggagatgtctgggtgacatttttctgctaggcttggaatgcatatagcagacagtatgaattttagttacagacatttataattgggtgactagagactataacattgaaataactttttagtgactgtatatatattagcaaaatgaatagattatttttctgcttctagcttttcaattaaaaataaagacacaggaaatccttcgaatatactttgttccaattgagtttatttctttgattgcgaaattaattgttctgcaggtttttgtttaatttttttgtggcttaaaacagtaaacatttattatctcatagtttctttttttattattatactttaagttctagggtacatgtgcacaacgtgcaggtttgttacatacgtatacatgtgccatgctggtttgctgcacccatcaactcgtcatttacattaggtatttctcctaatgctatccctcccctaggcccccaccccagaacaggccccagtgtgtgatgttccctaccctgcgtccacatgttctcattgttcaattcccacctatgagtgagaacatgcggtgtttggttttctgtctttgtgatagtttgctgagaatgatggtttccagcttcatccatgtccctgcaaaggacatgaactcatccttttttatggctgcatagtattctatggtgtatatgtgccacattttcttaatccagtctatcattgatggacatttgggttggttccaagtctttgctattgtgaataggctgcaataaatatacgtatgcatgtgtctttatagtagcatgatttataatcctttgggtatatacccagtaatgtgatgactgggtcaaatggtatttctagttttagatccttgaggaatcgccacactgtcttccacaatggttgaactaatttatactcccaccaacagtgtaaaagcgttcctgtttctctacatcctctccagcttctgttgtttcctgactgtttaatgatcaccattctaactggtgtgagatggtatctcattgtggttttgatttgcatttctctgatgaccagtgatgatgagcattttttcatgtgtctgttggctgcataaatgtcttcttttgagaagtgtctgttcatatcctttgcccactttttgatggggttgtttgtttttttcttgtaaatttgtttaagttctttgtagattctagatattagccctttgtcagatgggtagatcgcaaaaattttctcccattctgtagggatgggagcctacagaatgttctgtaggctgttcactctgatggtagtttcttttgctgtactgaagctctttagtttaattagatcccatttttcaattttggcttttgttgtcattgattttggcgttttagtcatgaagtccttgcccatgcctatgttctgaatggtattgcctaggttttcttctagggtttttatggttttaggtctaagatttaagtctttaatccatcttgaattaatttttgtataaggtgtaaggaagggatccagtttcagctttctacatatggctagccagttttcccagcaccacttattaaatagggaattctttccccattgcttgtttttatcaagtttgtcaggttttgtcaggttttgtttttgtcaggtttgtcaattagttgttctgcaggtttttgtttaattcttttaaaatttttgtttattgtctgcttgtcttggttgtatttgtctttttaattgatttgtatgggcttttaaatatatagtgtggatagtaatcctttataatacatatcattaaaaccttgttgtttgtcattaaattctttaatttcttttttagctttaaatatcttaatttatcaaaataattcttatacataattaaataatgttagaatggttataatgaaaaaacaacagctcccttcactatactactcctcctttcttcccagtcccacatccccagaggcttcgcaggtctttgatttatttttctgatatttattgtcatttctaattgtggtgaaacatgcataacaaaatttaggtttttttttttttttttttttttctgagatggaattttacccttgttgcccagtctggagtgcaatggtgtgatcttggctcactgcaacctctgcctcccgggttcaagtgattctcctgcctcagcctcctgagtagctgggattgcagtcatgtgccaccacacccggctaattttgtatttttagtagagatggggtttctccaggttggtcaggctggtcttgaactcccgacctcagatgatctgcccgccttggcctcccaaagtgctgggattacaggcgtgagccactgcgttcggccttagcattttttgtgtgtgtacaattaagtacattcacaatgttagacaaccaagaccactatctattttcagaacctttcatcataccaaataagaactctgttcccacaaaataactccccagattccttttccccatttcctgttaccctctagtattctttctgtctctgtgaatttggctattgtagctacttcatataagtggaatcatacagtatttgtcctttgtttctgatttatttcattagccataatgttttcagggttcgtccatcttgtagcatacatcggaatcctttttatggcagaataatatttcattttatatatatatatatatatatatatatatatatatatatatatatatatataatctcacatttgcttatccattcatctgtcgatgggtatttggattgtttctaccttttgcctgttgtgaataatgctgctatgaacgctggtgtacaaatatctatttgtgaccttgctttcaattcattcggatatatacctagaaatgtaatttctggatcttgtgataattctaaatgtaacttctttttttgagatggagtctcactctgtcacccaggctggagtgcagtggcatcatctcagctcattgcaacctccgctttccaggttccagtgattctcctgccttagcctcccgagtagctgggattacaggtgtccgccaacatgtctggctaatttttgtgtatttttagtagagacagggtttcaccatgttggccaggctggtcttgaactcctgacctcaggtgatctgcctgcctcggcctcccaaagtgctgggatcacaggcgtgaaccaccacgcccagcctaaatttaactttttgaagaaccaccaaactgttttttttatagtcaatgcataatttagattcccatcagcagtgcacaaggattccaatttttccacatttttgccaatacttgttattttatgttttttttgataatagcctttcaaatgggtataaagtgtagtatctccttgtggttttgatttgcagttccctgatgactagtgatgttaagtatattttcatgtgcttattagtaattcagacatcttctttagagaaatgcctattcaaattctttgcgcatttttgcattgagtcatttttagtatattcacaaagttgtgtaatcatcaccactgtctaattccagaatatttttctgaccccaaaaagaaactcctaactcattaacagtcactgcctactcttacctgctattccctagtatccactaatctgctatttctatagatttgccttttctgaacatttcatctaaattgaatcatacaatatgtgactttttgtgtctggctttttcacatagtgtaatgtttccatgttcagcattataggatgaattaatactttattcctttttatggctgaataacattccttttactttcaacctatttgtgtctaaatttaaagtgtgtctcttatagacagcatatagttggagcatttgaaaaattcattctgcttatctctgccttttaacttgagtgtttactccatttacgtttaatgtaattagtgctaaggtagtgtttacaaatgccactttgctgtttgttttctgtatatctggtgccttttccccctctatttctctatcattgccttttgaatctaatagatagatattttctagtgtgccatttaaatttttctaatgtgtcactttaattcccttggcttttcttttactgtgtattttttagttattttcttagtggttgtcctaggaattatatttaacatcttatgtagtttggattaatactaatttaattttcaatagaatgcagaagctttaatcctatgtagctgtttttttaatcctaccttctttgtgtcattattataaaaattacatctttacacattgtatgtctctcaacacagatttacaattattaccttttgcaactgactttcaaatcagataaaaaaaattaaaaacagaatacattttatattgtcttttgtatctatgttaaaacacattttatactgtcttttataactaccttgtagttatcttgaccagtgctctttaattaattcttaatgtggacttgagttactctccaatgtccctaaaaacttattcttaaatagaatctgagccttgcagctgtctctctctgttgtaatcctctgctgttatactggagccctgttgatgtggtggtaaggtatggggaacaggaagcatcttctaatcctatgattatgtctcagtcttttagcatgactgtgtcccttgcctgtgaccttcacaagtgtttctgagctcttcattcatatcataagattagatggcagggagctgcagtttaggaaatgatcccttccctcatgttggataaggatctggtaaaatcttccttactggcagactggccattgttttagagaatgcgttgaacgtatttcaaaatggttgtttttttccctcctcctgcccgaaacagtagggtttttcttggctctttactgtgggaacctggtgggatttttagaggtaatgtcttaaaaattgtgggccccctggcaagactgcagcccctaggagtttctcacttataaactagttcacattttatctccagcaattcatcaatattatcttttaactatttctgtcaatttatgttttagtggccgctgtcccagtaagcatatcttgattctctgtatttacctgtctctccagatttcagggtggcagtttgccttgtgacctcagttctcagatggatcccagaaaagtaattgatttttagtttgtttaacttttttctgttgtaaaacaggtgtgatgacttccagttctttacatattggagctgaaatcagaagtccaataaaattggcaaaaataaatttgctactgagtttcagaatctagtcataagagcaaactagcacattattataatcttttgtcagtaccgttgtcaattctcacatagtacagtgactacagttattaaatgtattaatattatgccatctagttttcatttcagaggggtttgatactgaccatgcagaagacagaaagcctacattagaattcatttcagggggacatgaggaaccaggattgaaatataattagatgggttgtattagttctatgttgctgcataacaaattaccacaaaattagcaccgtaaaacagtacacatttatcatcttactctttctgtgggtcaggagtctgggcatggcttatctgggtttttcttctcagtgtattacaaggctcccagcagagtcaactggggttgtggtctcactaaaggcttgactggggaaagattagcttccagggtccctcagtttgtttgcagaatttatcccttgtagtcgtaggactgagtgagatacccagtcttttgcgggctgttggctaaggatgactcttaggtcttaaaggttgcattcaggtcctagtcatatcgccctctcaacaacgtggcagcttattactactactacttttttttttccttcttcaaagccaacaaaggtgtctcttctgtaggggtgcattgtatcttttaaggacttttacctgattaagtcaggtccacccaagataatctcccttttgattaactcagaatcaattgaggtagaccttaattacgttcataaaatcccctcatctttactacataatataatctaatcatggaagtaaagtcttatttttatctcacaacggggagaagtttatgcaggttgtatatagggagtaggaatcttaggggctatcataaactttttatcacaggggttaatttatcagggtaagaaaaaggttaggaagaaccattagaataaagatttgtgactatggcatatgaaaatattaatagaagtgaaatgatatttatgaaatttaggtagcaaaggcatcacaactgcacataataatctttccataaatgcttgatgaataaacacacgaatggatggagactaactcttattgttccaagtctttcttactgcctttgaagttagaggtattttagaactgcaaactaaaattcctgtgatttcccgtagagcaatacagcctaattccatatactaatacttattttgtattgagaaagaactttaaatatctttagttgaatttctttaaaataccaaaatatttatattgagagccttgcttatattatatttaagatcttcctgagaaatctcataactttacttcacatttatttttatttacttaatccattgaagaaatcattattgagtacatactttgtgcggaggactgcactaagtcctgttaaagattcaaaaataaacaagttactgtctcttcaagaagatttcagtttgggttgtggtataaaataagtgtacacatccttgcattatttgacaaaatttgtaatcattagagagattaagaagaatgataatggaattaagagtaggaagagatcacatgtgattgaatgaagcagaggagtttcctagaggaggtggttgatatttcagtgggtattaaagaaaggtggatagatttctactggtagatgtgggagtgaggaatataatattctggaccaaggagacatgtattagcaaaggcacagaaaatattttcataatcacagagtttagcttggcatgtgtgaaaatgtaatgtaaagactggttgcagagtttcataaaagaaacataggataagggccaggtgcggtgactcacacctgtaatcccagcactttgggaggccaaggtgggtggattgcctgagctcaggagtttgacatcaggttgggcaacatggtgaaacctcatctctactaaaaatcaaaaagaaagaaagaaacatatggtagaagtctaggcccagtgcagaagcctataatcccagcaatttgggaggctgagataggaggatcacttgaggccagatgttcaagaccagcctgggtaacatagagagacccagtgtttaaaaaaacaaaacaaaaaatatcagccaggtgtggtgttgtgagtcccagctacttaggaggctgagatgggaggatcgcttgagcccagaagtttgaggctgcagtgagctgtgatcacaccactgcactccagcttggccaatagcaagaccctatctctaaaaaagaaaaatatatgtctaaagtttttcaaaccatacattttagtggtcatttcttcccccttatatttaatggccagttttcttcctgtactagataattggaatgggtgatttactcaaaactttactctttcactgagtaaaaactaatattcttttgatgtaaactgcagcatttgtttaagggtaagagtgagaacgttgttcatctagtttttttccccacattctttcagaccaatagtttatggtaactaggaggaatgccattcttccactaagataaatttgattttgactctgttgttatttaagtagtagcagcattgctttagaactctctgaaattcatttttatgggtagaagagtttctaaactctttatatggacagagaagtttctgtccatataaagagaatagaaacttttctattaaatcattttgaaaagagactctctggtgccaaagtaacaagttggatctttttattcatacaatacagacttcgacttaaaaaaaaatacatctttatgagtaatatgtataaaccattttccctgagggcatattttacattcatcactgaatgtcagatgaggaataaaatgcaaacattcctgttcactctctagctgtagttttttaaagtattgttcagcactaaatttgtatgttaagaaatttgcagtgctactagtttgttttggttctcatttttaaagctgtaccgcacttaacctaaaggagaaactaaattgctacattaaaaagtgttttttttcccctcgtgtagaaggctgaaatttctatagatataaatttgctttaagtgatcaactgagccttttgaagaaatatttttttctacagtgttaaatagaaagaatcattatgccattgaggctttgggatgtggtagagaggttgtatatctctcaggttagatgtagttcttgagaacttctgctcttggttattaaacaaaaagtattcctttgtttgttcctttgtttattcatttgacaaacatttactgggcacatactacattctgagtagacaattcatatggctaaggtcatacatttaattagtgaaagcatttgccttagaactcctgattttctagttcaatgctatcctcgtaatagtattctactgtttgaaatatagttgatctgataaatattaatttgacctattatttttatttagaacaatatgcacttatataaaaatacctacatattggtatacctatatttatgtttgcttttcacatttgtttttgattatgagctaaactgttaggaagatagatataagagctactctgaaagaggatgttaaaaagctgctttaacaattgaatgaaaatagtagggcagttggaaagtaacaatttaataaccaagttgttttttgctctgtgtgtgtgtgtgtgtgtgtgtgtgtgtgtgcatgaatatagtcatttatgtactttctataaataacatgaatatatttgtatcacatctggtttcaaaaaagctttataaaaatatattgattaggctgggcatgctggctcatgcctgtaatcccagcactttgggaggccaaggagggtggatcacctgaggtcaggagttcaagaccagcctggccaacatggtgaaactccgtctgtactaaaaattcaaaattaaccggacatggtggcacatgcctgtaatccctgctaattgggaggctgaggcaggagaattgcttgaatccaggaggcggaggttgcagtgagccaagatcacgccatgcactccagcctgggcaataagagtgaaactctgtctcaaaaaaaaaaaaaaaaaaaaaaaaaaaaaatatatatatatatatatatatatatatatatatatatatatataatatatacacacacacacacacacatacatatgtatgtgtatatgtgtatgtgtgtgtttatgtatgtatatgtattataatttttaagtgaaaaatctagggagaataaaggcagagaagttaagattaaactagagtcaaggatgtccaggtaacttagtttgagaaggcagtgtcttggtcaattttttgatgctataacagaataccacagactggacagaaagaaaataaatttatttctcacaattctggagactaagaagtccaagtatcaagttgccagcatctagtaagggccttcttgctccatcatctcgaggtgaaaggtgaaagggcaagtgacacagaaagaaaaagctcctttattttttaaaggcattaaacccatccatgaggacagaacctttctggcctaatggtctcttaaatgctgcacctgttaatactgttacaatgacaattacattttaacatgactttgggaggggacattcaaaccatagcaggcagggatcaagtagcaaatttagaagctgaattcatcctaactccctgtgctccccccacccccttagttctaaactatttttcatggatgtaaggataaatataggaagcacttttgggaaatgacagacaaattagttaaatataacttatgattaatttactgtacattttacatattaaagcaatttttgagcttgatatggactagaaaaacttggaggttctagttgtttcatcttggttacaatctttaatatctacccagttaatcttcataatagcaaccaattgattttcctttttggctgacagtttcatattggcaccttttgaatttagatgatttgtgtggtgtcaggagggacgttaacttgatgcagtggtagtctccaaatatacttatcccagaggtcatgggacaaaaaagtgacaccacattgggatgcttgaatcatatagtttagtaaagatagttaaaacacacagtgggaggcaaggggagagagttgagggtaggttaacatgtgaatacaatgtaagtgggtggaaggaccacactacctaaatcctgggctgtgcaatgtttatgtcttgtctttctcttttccacatcagctctcctttgctgatggtgtgcttacagagactagaaatgaggtttatgcaaggggacccaacagatgcacaattgacacactttattagagtaaggccagcgcaaatgcacttggccacagctgtagtccatcagtttgcctgctgagctacaatgtattttatttgcctttcttgggcagaggatacatggagccagaatgggtgtcaccaatgggtggctgaataagattttatggatattgggtagtattttatatgcctcagatatatttaatgtatcttggatatttgatacctcatgtatatgtagtgtatcttgaatatctagtgtctttccatcctttttcatctatgttcatagagaaatgctgtacttactttatctctttaatatggcttacacaggtttctaacttctagctacgattttaacattttaagagtttcacccatctatttgggttcttgtattttatatattctcaaatatacagcagatgcaaattatagaagcgaactctcccaatctctagccttcgattttaagatatctagttaactcaagggttattgcatttttgaaaagtctttcaaaagatacatcagtctctacaggacatggtgaatgaatggttagagctcatatcagtgcgttggttgtttgcctttgtacaaagtactatttctgaggagtttttagaaataagattcaccttgcttgcctagtgtagataatgttagcttgaagtcatgctaacatgagagatcataaaggaaaaaagtcatcaaggaaaagattctacagatagcagctcaatgtagagaataccataggtcacatggtattttttataccagttttaggttcacagcaaaattgagtggacagtatagacagctctcatatacccctttacccgacacatgcacaaccttccccacattcccataccagctgccctgtgtctggacttctgacctacagagactgtgagataataaatgggtatttcttttcatgctacaacatggatgaatctggaggacattagactaagtgaaataagctcgtcataaaaacggcaaatacactattacacttatatgaggtacttagagtagtcaaattcagagatagaaagtagaagggtggttgccccagactctggtaactaccattttactgtcacttctttgagttcagttgttttagatgccacgtaaagtaagggcatgagacatttatctttctgtgcctggcttatttcacttagcataatgttctccaattccagccaaatgaacaatgctacagtgaacgagggagtgtagatatttcttctgcaaactgacttcaaattttaggggtaaatactcagaagtgagattgctagatcataaggtaattctgttttgagtgttttgagtaatgtccattcagttttttataatggctgtactaatttacattcttaccaacagtgtccaaggcttcccttttctccacatcctcaccaacactttgttatctttcatctttttgacagtagccattgttacaggcataaggtaatgtttcatcatggttttaatttgtatttccctaatgattagtgattttgagcattttttcatgtatctgttggtcatttgttgtcttcttttagaaatgtctattcaaatcccttgcccatttttaaattgagttatttgtgttcttgctaatgagttgtttgagtttcttatatattttggacattaactccttattggatatatagcttgtaaatattttctcccaatctgtaggttgccactttgtttattgttttctctttgttgtaattgcattggcctatttttgcttttgttgcctgtgcttttgggatcaaatccaaaaaatcattgcctaaaccaatgttatgtagttttcccccctctgttttcttctagtagttttacagtttcagttcttgggtttaaatctttaattcattttgagtttttttttaaatattgtgagataagggtccattttcattcttctgcatgtggatatctaattttcttagcaccatttttagagagtctttttttcccattgtgtatacttggcacctttgttgaaaatcagttgagcacatacatgggtttctttctgtgctctttgtttcgttggtcactgtggctgttttttatgccaataccatgctgttttaattactatagctttgcagtgtggtttggaatcaggtcgtgtgatgcctccatttttgttctttttactcatgactgccatggctattcaaagcttcttgtggctctatatgaaatttaggattcttttttctatttctatgaaaaatgacattggaattttgatagagattacattgaatcaatatgtcactttgggtaatatgaacattttaacaatattcttccagtctatgagcaaagaatatcatgctatttacttgtatcttctacaatttctctcatcaacattttatagatttcagcgtacaagcctttcttcaccttggttaaatttctttctttctttctctctctttttggtagctattgtaaaaggagttctcttaatttcttttttggatagtctgttattagtatatagaaatgctactgattttttgtgtgttgattttgtatcctgcaagtttactgtatttattcatttattagttctaacagttttttgttgtagtctttaggggtttctatatataagattatgtcttcagcaaacaggggcagtttcacttttttcttttctatttggatgctttttatttctttctctttctaaatttttctggcaaggacttcagtactgtgttaagtggacatagtgaaagtgggcatccttgtcttgttccagatcttagaggtaaggctttcaattttttcaccattgaatataatgttaagtgtggtcttatcatatttggcctttattggccaaatatgcagtacatttcttctatacctaatttagtaaaagtttttctcaggaaaggatgttgaattttgtcaaatgatttttctacatctaatgagatgatcatatggtttttgtccttcattctattaatgtgctgtatacatttattgatttacatatgttgaactatctttccatccagtgataaatcccatttgatcatgttgaattgttcttttaatgtgttgttgaatttggtttgctagtattttgttgaggatttttgcttttctatttatcaaggatattggcctacagttttcttttcttgtattgtccttatctggccttggtatcagggtgataatgctggtcatgtaaaaagaatttagaagtatatcctccttttcaacttctttgaaagcatttgagaatgattggtattagttctttaactgttaggtagaattcagcagtgagccaacaggtcttgggcttttctttgattggaaagaactcattattggtctgtttaaattttctatttctttatgatgcagtcttggtaggttgtatgtgtctaggaatttatccatttcttccaggtatccagtttattttgttggcatataattgtaatagtcactttgatcctttgtatttctgtggtatcagttataatatctcctcatttgtttctcattttatttgaatattctctttttttcttgttaatctagctaaaggtttgttgatttcatttatcttttcaaaaaccaattcatagttttgttgatctttgtgttgttttcctagtctctactttatttatttattctctgatctttattacttctttccttctgttaattttgggcttagttcttctttttctagatccttgaggagtaatgttatttatttgggatcttcttttttgatgtaggcatttgttattgtaaactttcctcttaggactacgtttgctgcatcccttaagttttggtatgttgtgtttccatttttgtttgtctcaatatattttttttaaatttcccttttaatttcttcattgcccccttggttgtttggttgttcaggaacatgttgtttaatttccatatatttgtgaattttcccaaattttcctgttactcatttctagttttataccattgtggccagcaaagatacttgatatgataacaaacttaaatttgttaaaacttgtttcatggcctaatatataatctatcctggagactattttatggtatttgagaagaatgtgtattctgttgctcttgaatgggatattctgtacaggaataccttattttattgtgctttgctttatcgcactttgcaaatattctgggttttttttttttcataaattaaaggtttgtggcaaccctgtgtcaagcaagtctattgtcaccatttttccaatactatgtactcacttcatgtctctgtgtcagcatttttttagcaataaagtattttaaaattaaggtatgtatttttttagacataatgccacttgtacacataatagactgcagtatagtataaacattaaccgtttatatatgatgggtaacaaaaatgtatgactcactttattgtgatatttgctttattgtggtggtctgaaactgaacctacaatatctccaaggtatgcctgtaaatgcctgttaggtccatttggtctaaatttattcaagtccaatgtttttaaatatattttctgtctggatgatttgttcattgttgaaagtggggtatcaatgtctcctactattattgtattagaatctatctctcttttcagatcctttaatacttgctttatatatttaggtactttgatgttaggtgcatgtgtatttacaattgttatatcctcttgatgaattgacctttttttgttaaataatgttcttcgttgtttctttttacagtatttgacttagtctattttgtcttatgtaagtatagataaccccactctcttttggtttccattttgttgaatagcttttttcagctgctcactttcagcctctgtgcatccttaaaagcaaatctcttgtaggcagcatatagttggatcttcttttcttactctttctaaattgctctgggaattaagactctatgtctttttgctagagtgtaattcatttacattcaaggtaggtattgaaaggtaaagagttattactgccatttatttatttatttatttatttatttatttatttatgacagggtcttgctctgtcacccaggtcagagtgcaggggtgtgatcataggtcactataaccttgaactcctgggttgaagggatcaacctcagcctcctgagtagctggtactacaggcatgtgccaccacacccagatacattttttaaaaacttttttttttttagagatagggtcttgctgttttgcccacactggtcttaaactcctggcttcaagcaatcctttggcctcaagcaatccttctgcctcagcctcctaaagtgctggaattacaggcatgagtgaccacgcccacccagcattgtgaattattttctagttgttgtgtaggtactttgtttctttatttctcttgctgtcttcctttgtgatttgatggtttcctgtagtggtatgccttgaggcctttctatgtttgttatgcactgcactgtaatttaaatatttttcttttggatcttattcactagattgtgaagcgatgctttctccaaaaaatttctttcaagttttagagcaacaaatttacagcagattcagatggcaatacttgaaagtagtaacttttaggtaacattatagtggttgcttcttattcatctgcttccctcagcctgaattctaatagtgcaagagcactgacttcattatagtttaattattagcccatttacagaagtatagaaaacgagttgcctttttcgcctacagttaatctattcaggaaaagaatgaaacatatagttgaatttgtgtgaataagtttatacattcagattttagccaacattattaactcagtcaacagttcttcatttttaaaaagcaaaacaagtcagattatatacattttaactaaatgattactttagacattgatgaattaactgttgatgaaacaacagtaattcagaatttatgtttcaaagagttaagaatttgttccatacataacatagtattgagttcttattgttttcttttcttttttctctttttttttttcaagacagtgtctcattctgttgcccaggctagaatgtggtggtacaatcactggctcactgtagtctttacctccctggctcaggtgatcctcccacttcagcctcctgggtaactgggactacaggaacataccaccatgcccagttattttttttgtagagatggggtttagccatgttgcccaggctggtcttgaaatcctgagctcaagagatctgtctgccttggcctcccaaagtgctgggattacaggtgtgagccaccgcgtctggcttttattgttttcttttcacatgatttcaggaaagtagaatttcatgtgtaaatatgttagttgttttacaaatgtcattttttgaagttttttgcattgtaaatatcattgtatatttttatcagaatgtatcaagaagtaactgtaaatcaggtgtcactagtgcattactgcactagtagtgcagctctgacattttcagagtcctcagtattttaactaatttatgagagagagtgttccttttcagagagggctgtaggatcttcatttccagttagattgccaacagaggtcttactttcactttagggcagtatttgtctatattattcctccaagtgcacctccaactgcacctgtgttcattgaaagtttgattctgaaatataacccagcctcttgaggtgaaagtgctgagtcaaatatcaccaaacaggaagctgtttcaatagaaattcatattcttggttttcttatattttcagtttgtatttagcaaaaattaaggacattcatttttactgtaactaaaaaagttatttaaaaaacactactactttttcatttttattagtatttaaaaggaactcttttttatttctaacatatgccacatatgggtacatatcaactgaataaaagaaagtaaacatttaaaacatatgagtacctcatgaaatgaataatgaagaatcatctttagatggaaaaatataccaggttctacttatgaaataaattatgtgagtaagattacaaaagatggtagtctgtttaggcaggcctattaaaagcattaagacttgagtactggctattaaagtgagtaaatggcaatattataaagttaaacacatgccaaaaaacattttccagaggactgggattgtaacaataccactaatgagggcaaagaggtcttaatgcaatttgcactttctaaagtttcaaaaagaggctttgagttagtgtattattaatgtactgaacatctggaactgtgtaaaagctatggacattgagcaaatgcaggatttccccactaggttgcattctaacttattccctccctagcgaaatactagttttaaagaagtttgacaaagtaaaatgacaatatccagataagacatgggcattctaaagtgtcttttagtttgtgagatctgactttaaaaaaaattgcctctgaggttaacaaattgaagtgatgtgaacaccaattagtaaattaaatcatctctatcactatatgttggctggtctccctatatgaatagtatttaccctttatgagctattaagtaggatattttcaacaaagatacctcacatttttcatatatgtaagccataagacctgagagacagctctgtgtcatcgtactttcctttaagttagtttttaggtgcctagttaggatacctaagagaatttaacaattgagttatttttgtgtttatttatgtgatttctctggcaagacagaaatagttaagctgtctaaatgtgtaattcaagtgtcacctgcaatgagaatataaaagctgtagacctaaatattttgttatctgaaactgaaaatttgctgtaggccattttcactaaaataaccagtatgtttttgctatagaattgtactccaaatttgcatgtagcccctgtgtaatccttaacaaaaggttttaaggtactttaaaaaaaatctccactgaagaaattaaaataaaacacattgtgttctgtggaaatgtgtcatagtcaccaaattctcccttttatgaagtgttcctcatagctctttgcccgaactaaaatccggatagacccagaggacataccacttcgtcagaccttccaaattgtgaccatcctttcctctcgtaacttgcagtatctcagacttagtatcctatttactctccattgttctttctaaatctttacctgtctgttttcttccggaagggaggggagaagaaaggaagggaggaaggaatgaatgaacaaagtctcaccaagagaaaactagtctagtctagctagtctgtttgctcatgtcttttagtcatacccttctttccccctcatctttgtcatcttacaaagcatctggatactcttatttttaatattttatttttatttgttttttcagatagggtctcactctatcacccaggctggagtacggtggcatgatcacagctcagtgcagcctcaacctccagggctcaagcagtcctcccacctcagcctcctgagtaactgggatcacaggcacacaccaccacacccagctaatttttgtacttttgtagatacagggttttgccaagttgcccaggctggtcttgaactcctgggctcaagtgatcctccagcctcagcatctcaaagtgctgggattacaggtgtgggccactgcacccagccaactcttcttttattaaggacttgggcatctggttttacagttatgttttacccctccctactctcctccctgaccttccattgttttggaccttcatttttcattcatttataaaattcattcaaaaagtatttactgaccactttctatatgtaaggtactgttctatgcactgggcaatcagcagtaagtaaaacagacaaaaatcattgtccttttgtattccagggtgagagacagaaaataaatgagagacacagaaagctactaatatgttagatgatattatggactgaatgtttgtataccaccaaattttttatgttgaagccctaacccccagtgtggttatatttggagatggggcctctaaggaagtaattgcggttaaatgaggctgtaagggccttccttatctgataggattagtgttcttataagaagagacaccagaaaacttcattgctctctctccctgttcctctctgaatagagaggaaaggccatgtgaggacacagaaggtggctgtctgcaagccaagaagagagccctaaccagaaatcaagttaacaggcacctttatcttggacttcatagccaagaagtaagaaataaatttctcttgtttaagccactcaatctgtggcttaaactaataactgtaagaaataaatttcttttgtttaagccattcagtctgatatttttgtgtggtagcctgaggggactaatacagatggtgataagtgctatgtagaaaactaaagcaaggaaagggggaaaagaggatcctggggttggaatttttttgggtgggggctggagggtgctcatttagaatttaattggatggtttgggaaggcctatctgagaaggtgacagtgagtaaaagtgtaaaggaagagaggaagcaaaccattctgatttagggggaagaatgttcagatagtgggaatcttgagacaggagagtacctagtttgagcaaaaggaagccattgtagcagagtaggactgaagtatggggaattgaaggagatacggccaaagaaatagctgggtaaaatcacaccacagtaagaatttagattttgttctaaatgcagtaggaagccattggagggtttaaacttagttttaaaaggattatgttggctgctgtatggaaaatggactgtagagagcataggctgaagcaagggtgactgttaaggagtctgctgtaatctagatgatagatggtggtggcttggaccactgtggtagcagtaaagatagtgagaaatgtttagagtctagataaatttaaaagtagtgctggcaggatttgctgatgaattggatgagcagtagtagagatgaggggctgggtgtggtggctcatgcatataatccctttgggaagccaaggtggaggagtgcttgagtccaggagtttgagaccagccttggcaacacagcaagaccctctctggttttttgttgttgttgttgttgttgttcttttcaagccagacatggcagtgcatacctgtagtcccagctacttgagaggttgaggtgggaggatcgcttgagcccaggaatgtgaggctacaatgagctgtgatcacaccactgcacttcagcctgagcaacagagtgagatcccatctctaaaaaaaaaaaaaaatggagaggaaataagattttcttgctggtccccccttttaaatctgtactctcccactaggcaatctcatctctatacattcttttttagttttatcttttgtcatgctttcctaatatataattaaattctgacttcttccttaagtactatgcccatatacccaactgccatatcaacatttccatttggatatcttaaaggcaacaaacttttaatctttccttccagtcttggtcctttgccagtgttgcctgtatgaatgaatggtactgtcttagttcattttctgttgcttgtaacagactacctgaaactgggtgatttattttttaaaaggaatttatttcttgcagttacagaggctgagaagttcaagactgagaggctgcatctggtgcgggccttcttgctggtgggaactctctgctgagtcccagggtggctcagagtatcacagggcaaggaggctgagtatacaagctcgagtctctattcctttttgtataaagccactagtcccactcccatgataagccattaatacatgactggacaaatccattcatgagggcagcactcttgttaccctgtcacctcttaaaatcccccacctctcaatgctgccacattagagattaaatttcaacattttggagaggacaaatgttcaaaacatagcaggtactgtaatcatatttgggctaatcatatacctacagagcacctgtgaacctttttctcccttccctgtcatgtcccatccaacaccatatcttactcattttaattttaagtatttttataatctgttcacttttctttctctacagttaattttcaaaaagataaagtcatagctcacatataaagttaacacctatcacagattttattaaactcactgattaatgaagaaaaagtatgatgattggcctattcagagagcatttaaggattcacgtacttgtaggcaatttaataaaggaatagactataagaaaactggttgatgtactacagggcaataaatagtaacttttagggttatcttttctcctgaacagaaatgatttgtatttgtattagacaaaaatatctaagttgaaatataattttgctaagtctggaaccttaattaatagtgaacagtgagttcaacaaagtgtatttccctagataatcttctagtgggcctttgcctccatttgaaatggaaagtttgtactgtttcttttttatcttattctcaaggtttgcattttttttcttaactctttctaattcaagctaccaccatctctggattactatattagtagcctaaatgtacctgttataacccctcctctaactcatcatattaataatcagactaatgttgtttaatttttatattttatatttgtgaaatatgtgtgtatataagtctacaaaactaatatgtacattttaaataataataaaatggagatctgagtatccatcacccagcttaagaaatagaacattatttctacattagaagcttccatctggccaggcgcagtgggtcatgcctgtgatcccggcactttgggaggctgaggggtggatcacctgaggtcaggagttcgagaccagcctgaccaatatggtgaaaccccgtctctactaaaaatacaaaaattagtcaggtgtggtggtgtccgcctgtagtcccagctactcaggaggctgggacaggagaattgcttgaactcaggaggcggagatttcagtgagccgagatcgcaccactgtactccagcctgggtgacagagcgagactctgtctcaaaaaaaaaaatcctccatttgttccttcccaattgtatccccctaaagctaaaggtattagtttcatgagttttttaaagttatatatatttttctcaaagaacatattgtttttgaactttatataaatgaaatcatatttgttatctatctgtatttgcattttttactcaacatctagaagtttatgattcatcctggttaatatgtgagaaactagttcatttatttatgttactaaatagtattcatttgtgtgttcttttcaatttttaaaattgtggtaaaatacacatgacataaaatttaccttttaagcatttttaagtgtacaacttagtgccatcaagtacattcatgatgttgtacaaccatcaccagtatccctttccaaaacttttcaatcatcccagtcagaaactgtactgatggaacaatgactcctgtttagccccttccctcaggccctggtaacctctgttctacttcccatctctaagaatttgtctattctaggtacctcatataagtgaaatcatataatatttgtactttgtgtacaaaaatacagtggcttttttcacttactatgggtttatccatattcaagcatttgtcagaatttcattcctttatagttgaataattttccattgcacgtaggtcatacattttgtttattcatctgttgattgacacttgagttgtttccactatttggttattgggaataatgcttctataaacatcagcatacagctgtttgtttggatcctagtactttcagatatttggggttatatacttaggagtggaattgctggatcatatggtaattctatgcctatgaacttttgaggaactgccagactgttttcctcagcagttgtaccattttacattgccactagcaatgtgtgacagttacagtttctgcgtgtccttgcaacacttacttatttggacagcagttatactaagtgaagtgggacttcattgtggttttgacttgcagtttcctaatgactaaggatgttgagcatcttttcatgtcctttgggccttttttttttttttaatcattcaagaaatgtctattaaagtcctttgcctatatttgaatctgtttggttttttcgttgttgagttgtagttctttatatcttctggatattaatcttttatcagccatatgctttgcattctgtgtactatcattttaactttcttgacagtatccaaaaaagttttataattttttatgaaatccgagtttatctgtatttttctttagttacttatgcttttgatgccacagccaacaaatcattgccaaatccaaggtcataaagccttctatttttttcttttagagttttatattttttagctcttacagtaatgtctttgaccaatgttgagttaatttttattatgtaggcaaggtgttacttcattctttttacatgtggtgatccagttttctcaacaccatctgctgaaaagaatcttcatgcattgtttcaataatgcaaaaaagcatttgacaaaatgcagcacactttcatgatacaaattctcaacaaggtaggaatagaaggaaatttaatataataaaggtcatatgtaagaagctcgtagcatactcagtggtgcaaactgaaaggttttcctctaagatcagaaacagggcaaggatgcccactcttgccatttctgtataacgtagtactagaattcctagccagagcagttaggcaagaaaaaggaataaaagtcttccaaatgggaaaggaaaaagtaaaattgtccttatttacagacgtgatctttcctaaagatcttatttttaaaaaacctgttaggactaataaattgagtaaagttgcaatatgcaaaattaacatacaaaaatgagttgtatttctatacactgacaacaaactgtctgaaaagcaaattaggaaaacatttccatttgcagtagtatcaaaacaaatagaacacttaggaataaacttaaggaggtaaaagacttgtatattgaaacccataaaacatttctatatatactgttttattttgatttttatttccttttctgttttccacagtggctatactgttttatattcccaccagcaatacacaaggattccaatatcacaacatcttcactaatagttattttatttacttttttaaataatggccttccgaacagctgtgaaccaatatctcatcgtggttttgatttgcatttccctgataattactgatgttgagcatctttccatatacctgttaaccatttgtatgtcttctttggagaactgtctattcatgtcctttgcctgtttttcaatttttttttaatattgggtttcttaatatattttggatattaaccccttatcagatatatggtttgcagatattttttctcatcctttaggttgcctttccactcttttttttccctttactttgcagaaaccttttagtttgttgtggtcccaatcgtaggttttacttttattgcctgtgcttttatgtcatatgcataaaatcattgttaaatccaatgttacaaaaattttctcctgtgtttttttctaagagttttgcagtttcaagtcttttttttttttagacagagtctcgctctgtcgccaggctggagtgtagtggcgtgatcttggctcactgcaacctccgcctcccaggttcaagcgattctcttgcctcagcctcccgagtagctgggactacaggcgtgcgccaccatgcccggctaattttttgtatttttagtagagatggggtttcaccgtgttagccaggatggtctcaatctcctgacctcgtgatctgcccgccttggcctcccaaagtgctgggattacaggcatgagccactgcgcccagccaacagtttgaaatcttacatttaagtctaatccattttgagtgaacttttgtgtattgtgtaagataaaggtccagttttattcttttgcatgtggatattgtttgccctgaactatttgttgaagagactgtcctttccccattatgtatttttggcacccttgctgaagatcagttgatcatacatgtgtggatttatttccaggctctctattctcttccaatggtctatatgtctgtctttatggcaatgcaattactattttgattatggtgggtttgtaagatgtaagtgtcatgaagcacgatgcctctagctttgttgttctttctcaagattgttttgattattccaagtcctttgtggttgcatattaatttttgtatttttttctgtttctgtaaaaaatgtcattgggattttgataggagttacattgaatctacatttgtattagtctttaaaatcaatggtccccaaccttcttagcaccagggactggttttgtggaagacagcttttccacagacctgggttgggggtgggggtgatggtttcgggatgaaactgttccacctcagatcatcaggcattagattctcataaggagcatataacctagatcccttgcaagcacagttcacaatagtgtttgtacccctatgagaatataatgctgctgctgatctgacaggagactgagctcaggcagtaatgctcactcacctgccactcacctcctgctgtgcagcctggattctaccagtattctgtggcctgggggttggggacccctgctttaaatgtttcatagaggactgtgcatagtggctcacacctgtaatcccagcactttgggaggccaaggcaggaggagcacttgaggccaggagttcaagaccaacctgggcaatatagtgagactccatacctacaaaaaaaaaaaaaaaattaccagggcatggtggctcatgcctctagtcctagctacttgggaggctgaagtaggaagattgcttgagcccaggagtttgaggttacagtgaactatgatcacattactacactccagcctgggtgacagagcaagagtgtatctcaaaaataaattaattaattagcaaagaaatgaaaataaaaaattaataaaattaaataaataaaaatgttttgtagaatcggtattgaggccatttaggtccttagcttttctttgatgggagactttttgttactgattcagtctccttactagtctgttcagattttctgtttcttcattattcagtcttagtaggttgtatattactaggaatttgtccatttcatctattttatccaatttattggcatataatttttcagagtagtcttttattgtatcggtggcatcagtgtgtcttctttcatttctgattttctcttttttttttccttaaccaatctaggtaaagacttgtcaattctgttgatcttttcaaaaaccaactttttaaattgtttttctgttccctattttatttctgctctaatcttaatatttctttccttctgcaaactttgtatttactttgttctttttctagttccctgaagtgtagaattgggttacttgagatctttcttttttaatgttggcattaccgctataaactttcctcttagtactgcttttggtgtatttcttacttgtggtatgttgtggttttttttccactggtctcaagataatttcataactttccttttgatttcttttttgacccattcattggttgttcaaaagtgtgttaattttcatatttttgtaaatttgctggttttctttctgatactgaattttagtttgattctgttgtggttgcaaaagatacctggtattaatttttatcttacatttgttaagacttgctttgttacctaacacatgatctgtcctagagaatgttccatgtacagttgtgaagaatatgtattttgctgctgttgggtaaaatgttctatatatgtcaggtccatctggtctctagtattgttcaagttccgtttccttgttgatcttctgtttggatgttttattcattactgaaggttagatatatgactttcctactcctcttatattgctgtttatttctctcttcagtacaatcactatttgcttgctatatttgggtgctctgatgttggttgtgtgtatatttatagttgttaaatattcccagtgaattgacccatttatcattatataatgtcctttttttttgtctcttgtgacaatttttgacttagaatctatttagtatcttagaattgccacctctgctgtcttttggttaccatttataagtaatatctttttctatcccttcactttcagcctatgggtatccttaaatttaaagtgagtcacttgcagacagcgtttttatctatccagctactttatatcttttgattagaaaatttaatccatttacatttaaagtaatgaccgatagggaaagacattattatcatttcaataattgttttctgtctaactacagcttttttgttcctctattcctcccttgatgtctttctggagaataaaaagtaatataataacttcttagctgtgtttatggaattaaagtagttcttcctatttaattaaagcatattgtacagcagttaactattttactaatgttttgttttatagtcttattaagaagtttatttctaaaaatagttaaaggtaaaattgaggaaataaactatcttataaaaattgatcagttgctgttttccagagaattttgggtggtttcttataataacttgtccaaattgtgtagaactcatagtatataacaagtggataaaacagttcaatttaaataataatctctaatattagcttttgtctttttcatttattcagctttattattaacttctttctttgcatttgctatatttcattttctagcttcttggaaagaatacttgattcttttattttgacattttaaaaataaatatatttaaagctataaatgtatttccatgtattgccattgctgtatgccacatgtttcgaattgtgagtgcttttcttattcataactaaagatttcatgagttatactgtgttttttctatttaactcatatggtttttaagaatatgagttttacagccacgtgtgttggttcacacctgtaatttcagcactgtggaaggctgagtctggaggatcccttgagaccagaagtttgagactagcctgggcaacaaagcaggatctcatctctacacaaaatataaaaattagctgggtgtagtggcatgcacctgtagtcccagctactcaggaggctaaggtggagggattgcctgagcctagtagttcgaggctgcactgagctatgatcttgccactgtactccagcctgggtgacagagaccctgtctctaaaatcaatcaatcaatcaagatgagtttttgttttgggcttgacttttaatctaccatgactttatattattgacttttaatctaccatggcataactgttgaaatatgtgatcaatatgataaggattgcttaaaatttgttgaatgtccttttgtaatctagcccatggctgtaaatgttccatttgtgcccatatattttctacttcttggctgagtctttatttctatcttttttcaatgcaggttattaatgatgatcaaatattcaaataatgagcttatctgcctatacacttagtaaaatgatcttaaatcatcttcatttgaagactatttaagaatattaagaaacttcaccttaggtttaaagagagaacttaaagtttgttaactttgacagaggttttttgttttttgcttttgcttttgaaattgccaagatagtagtagtagtagtagtagtggtggtggtggtagaaattgccaagataatagtagaagtagtagtagtaatagtagtagtagcagtagtagtggtagaaattgccaagataatagtagtagtagcagcagcagcagctaactgtgccagcaccattcagatctctctaaatctgttaataaatttaaccccataacagctctatgagatatattgttttcctcattttataaatgagaaaagacacagagagattaatatacttgccgtagtcacattggcttaaacaaatgaagttaagtttgtttagctagacacacaaaaaatcatttttttctttcccctctttagttattagaaaaattaaaagaacgttggctctctactggtttatggcataatctggagttggtgaagacagtcattgtagaaccacagggaggagaaaaaacaaattttgatgaattactgcaggtgtactatgacgcaatcaaatacaaaggagagaaaggtaactggaaattatttcatggtcggtgaaaaaatattttttattacaaagtaagaaggtacaattataattttatatttttagatgaattacacttaagagaaaaattataatcctgagtgaaaagaaaataaattgggtaaagaaattcttttaattgtacttgttctcctatgaatattttcacttgagtatgctgattcaactttaagaaaaacgatgccatcatctcacagtcttcagtgcactacctgaaatagtttgtgcaaaaaggcagttaggatatatataaatatattccttactagccaaatgagacctatattctgatgcatttagtacacttggtgcttgtattctattacataaggtaaacttgaattttcaaaacataactgaaaactcaattccaagttagagcatatccatgaagagtttgatgtgaggccgggcgtggtggctcttgcctgtaatcctagcgctttgggaggctgaggcgggtggatcacttgagcccaggagttcgagaccagcctgggcaacatggtgaaatcctgtctctacaaaaagtacaaacattagcagggtgtggtgcatgtgcctatagttccaactacttaggaggccgaggtgggaggattacctgagcccaggaggtcaaggctgcagtgagctgtgattgtgccactgcactccagcctggctgacagagtgagaccctgtctcacacacaaaaaataataaaataaaataaaaaagtttgatgtgaagggatagtagtagtttatgaacaatgcaagaaagaggtaatataacatatcagtatctttttatggtgtatatattatggtgttctctgtgtctgttttcaatacttttaaatatattgattccatatgatatgtattatcaattacaattatttcaattattctgagaattttactttcaggtggtaaaggtaataatgcaacttcaatttttattaaataaacctgtttataatcacacagttcatatgcaagttgctattctgacatgtttttactgtataagttatctggaagatgcagagtttgtaaattggtttgctacccttttgcatataaatgtaattttgttccccttatttacttaaagacattgaacttttaaaactttatctcataatagtgttttattttgattattttaaatttgctactgtaattactataattataaatcaggtattttcaaaatgacaagaataagcaatttctgagaattttggatatgcttttttctgttgtttaagatggagctctcctggtagcagtttgtcgtggtaaagtgagtgagggtctggatttctcagatgacaatgcccgtgctgtcataacaataggaattccttttccaaatgtgaaagatctacaggtaggccatcaaaaccttaagttttattattacaggagtcattggttttgtataaagttaattgcagggatccctcattttattgcgctttgcttttatagtgcttttttacaaattgaaggtttatggtaaccctgcattgtgcaagtctttcagcaccatttttccaacagcatgtggtcacttgtttctgtttcacatttgggttaattctcacgatatttcaaaccttttcattattattatactgttagggtaatctgtgataagtgatctttgatgttactattgtaattgttttggggcatctcatactgtacccacataagagagcaaacgtaattcataagtgatgtatgtattctaactgctccactgactacccttcccccatttctctctccttgggactctccattccctgagacacaacaatactgaaattaggccagttaataaccctacaatggccccagagtgttcaagtgaaaggaagtgttgcatgcttcctactttaaatcaaaggcgagacatgattaagcttagtgagcaaggcatattgaaagctgagacaagacaaaagctaggcctcttgcaccaaccaattagccatattgtgaatgcaaaggaaaagttcttcaaaggaattaaaagtgttactccagtgaatgtacaaataataagcaaacagtcttattactgatatagagaaaggtttagtgtctggaaagaagatcaaactgtccgtaacattctcttaagccaaaacttaattcagagcaaggccctaactctcttcaattctgtgaaagctgagagaggtgaggaggctgcagaaaagtttgaagctagcagaggttgtttcatgaggtttaaggaaagaagctatctccataacttaaaagtgcaagttaatgcagcaggtgctgatggagaagctacagcaagttatccagaagatctggccaagataattgatgaaggtggctacgcaaaacaacagattttcagtgtagaagaatcagccttctattgaaagaagatgccacctaggacattcatagctagagaggagaagtcaatgcctgacctcaaagcttcagagaacaggctgactctcttgtgatgggccagtgcagctggtgactttaagttgaagccaatgctcatttaacattttaaaaatcctagagcctttaagaattatactaaatctactctgcctgtgctgtatagatggaacaacaaagcctgcacgacagcacatctgtttacagcatggtttactgaatattttaagtccattattgagatctactcctcagaaaaatcagttcctttcaaaatattactgctcattaaccacacatgtggtcactcaagaactctatggagatgtacaaggagattaatgttgttttcatgcttgctaacaaaacatccattctgcagccaatgaataaaggagtaatttctacttccaagtctcattacttaagaagtacatttcacgaggctataactgctatagatagcgagtcctctgatgcatctggacacagtcgattaaaaaccttctggaaaggattcaccgttctagatgccattaagaacattcatgattcatgggaggaggtcagaatatcaacacttacaggagtttggaagtcattgattccatccctcattggatgactctgagggagttaagagttcagtggaggaagtaactgtagctgtggtggaaataataagagaactaaattagaagtggagcttaagacgtgactaaattgctgcaatctcatgaggacacttgaacagatgaggagttgcattttatggatgagcaaagaaagtggtttcttgagataggaactattcttagtaaagatgctgtgaacattgttgaaatgacaacaaaggagttagaatattaaataaacttagtgcatgaagcagcggcagagtttgagaggcttgaccccaattttgaaagaagttttatgttgggtaaaatgctatcaaagagcatcttatgccacagagaaatctattgtgaaaggaagagtcacatgatagagcaaacttcatggtcgtcttattttaagaaattgccacagccactccaacgttagcaaccaccaccctgatcagtcagcagtcatcattgaggcaagaccctctaccagcaaagagagtgactcactgaaggctcagatgatcattcaccttttttagcaataaaatattttcaagttaaggtatatacattggcttttgagacataatgctgttgcccacttaatagactgcagtatagtgtaaacatagcttttatatgtgttgggaaaccaaaaaattcatgtgacttactttgttatgatattctccttattggggtggtctggaaccaaacttgcaatgtctctcagggatgcctgtatatgttttcctgtatccttagacatttttaaatctttggtgaatctgaatgagtgagaaaaatttagtagatacagattttattttattttcaacttatactgtctttggtcaacaggagttattttcaaagtctggtcctgggccaggtgcattcgtatcacctgggaacttaatagaaataaagactttcaggctcatccagacctgccaaatcagaaactgtggaagtgaagcccagcaatttgtgttttatcagtcttttaaccacagactcatgggttcctccggggaatcctggggtcttttgtccatctggctcgcttctttccagtgtcctgccttgcagatcttgtgatttagtcactccatattctgatctcttccacctcagctcaacaggaccactgcgctctgcttgtactttaatgctctgtgctgtggtcaggaaattatacccaagcagagaactgggataatggagttcacctaatgaattccacttagctccagaattactgtcttgtgctgtttggtgtctactacctgaaaacaattgctccattttgcccggttatgcgattacttacaatggaagaaatattcttaaaccagttactcaatcttggccagaaacagttgtatctcattatcactgactgtttcctaaacaatatatttgaaaaactatagtaataatttgagcctaagttgaacttattgttcatcaaggaggattttcttttacttcctacaggcatttgaaagtgctggcaatctgagaaaatttgagattttctgaccactgagctgacttattgattatgacctatatccctccccctaggatacagtcagttagggtctcataccaaagcaggagttctttcattagaatagttatctttttaattgttaatactttactaggtactgtgaattagataatttttcttttatttttctagtccgtagcagtctttaggtaacattaacagtaataagcagtatttcttttggtagcccttactcttccgtaacctctggacctcttcaaaatttctgaaagtcctcagggggtatctcacttgatgattcagagtctaatactttttcagcctccagtaactttggtggtttctactacctttctccagttaaccagtgctactgctgagggcactaatggctatgcccaaagctgggtctcctattctaaaatggctgatgctgccttgactacagctactgatgaaacagttgacatctacccaagaaatctactgtcaccatcaacagcattggtgctgcattccactgaagtagagtgctactgatggcactgctgttggtactggtattgtctccttttaatgtcttatcattttactctagctctacattattgcactaaggctgctttgttaaagtggaaagaatccttttcccttctttagaccacatcttcttccaatatcttaataaaatacaattttgttccctaaaactaattatttccatttttgcctatgtcctctctcttccttggaccctacatatgagttcttgagacctggaaaagaagaaaaactttatggctaatactaggttgtactaaatattatacgtacaaagtaacaaggcctgaaaggatcatcaagattataattctgattacatatgaggagaagagaagggaatgatattcagagtagttatcaaaagaattttaactttttccataatttttagtaaaggaaaataagctgcaagaaaatatgagaatgcaggtatttattatgttattcttcattattttccaaaaattcttaaaattaaaaatatacatttgtgagaaaattccatttctcttttctccacctttgcctcaacagctatgattttgaacattgttattataccaatctggggttcttaatgctttttttcctcaggataaattcttcctagacaatatctcagtctgtcatgcaaaaaagacacctgatggcctactctgacattcctcagtcatgatcctatttgtcatagttctgcttatgtgcataaaacagcaaaataacagaagcatcaatgggttctgggtagaggggaggaaggtggttctaaagggttatccctagtggttcccaaaaggtacaagtagagtggacacaagaatagttcaagctgcagggacaagggatagaaaaagtgaaattatttaccagcactactagatgtactgggaagtgtatttcttattgccatatgtctggatcagttcttcttctgtaacaactccaaaacttagtgacttaaaacagcaatcatttattacaggtcatacatctctggagtgattgggtgacagatgatctaggcttgggcttggttggttggctctctcgattttagctgggctcagctactctgccctagttggctgatctgtgttgaagtcaactgagtcagctctgttccacctgtatttcattctttgtggaccaacagactagccaaggcatgttattattgcaatggcagtagtacaagagggcaggcttaactgtaagcagttaagtcaaatacctatttacatcacatctgctaacctcctgttgcccaaaacacgtccatgcacaatctcaaagtcaaggaaggggagaaaagggataatttctaccgcacatggcaaaggacttagaatcatgacttcaaaaagaagtcctcaactatcgcattttttcataattaaaaggtatttgttagttatccatttataagactggtgtgttacaagctttaagagtatacgcatgcagtttttataatgattaagaaggctttttattatttggaaatgcccagaatatagcagtcaatacctaaaatacttgaaatatgtcagagcatcattatgggtgatttcttaacatttttataaatggttaaacaagtatttgaaaatatttgtatgcctctatggaatataaaagttaagtttaaaattctaatgcagtccagtttatctgttttttttgtttgtttgttgcctgtgctttggtgtcatatttaggaaaatactggcaaatccaacatcatgcatatttgcccctaatgttttccttgaagagttttatagttgtaactctttaatttagatatttgattcctcttgagtaaatttttctatgtgatatatggtgaggtccaatttccttatatctaagtgaatcttttatttacagcgtatagttggatcaggtttttaaaaatccatttggccaatctctgcctttcaattggagagtttaaaccatttacatttaaagtaattactgataggaaaggacttacttttgctatgtagctatttgttttcttgtgtcatgtgctttttgttcctcaatccttcatcatttccttttttgtatttagttgatttgtagtatactattttgattcccttctttccttttatatgtattttttggtttttagtatttaccttggggattataactatcatctgaatctctgttcctccctttttatattgttattgtcacagattccatctttatactttgtgtggctgttagtttttaattattgtttttatgcatttgccttttaaataatatagggaaaacagaggaattgcaattcaaaagcatattgtagtattcacctgcagttacctttaccagtgtcctttattatttcctaaagcacatatttagtgtttataaagatgttttataatctgtttcatggtgtaccttgaggatagggataatttcttcagcatctttgtgtctctacaactaagatattacctaaaaacacagtgtttaataaatgttttagttaatgattgaatggggttttagtagaagttgttaaaattgtatttgactttgttatttgtttttaaaaacaacagcaaccactctccattcctggagactttaaggatggaaatgatagtaatcattagataataatgaacaggatggtagtaaacagtgatatgactcataaggaggcaatacagggtagttatagtagtaaatcattagaggatatgtagaagggaatgctcaatcctcaacagcatcttacactttatttaatacatagtagaacataataagtggagggagtatcttatattgactatattagctatccctcttttattatttatttatttaaatatttttattttattttatagacaaggtcttgttctgtcgcccaggttggagtgcagtggcacaatcatagctcactgcagccttgagctcatgggctcaattgatcctcctgcctcagtctcctgggtagctaggactgtaggcatgtgccaccacacctggctaaacttttttttttttttggagaggcgaggtcttgctatgttgtacaagctggccttgaactcctggccttaagggatgctcagacctcagcctcccaaagtgctgggattataggtgtgagccatcatgcccagcctgtattagttttttattgctgtgtaacaaattatcacatagtggcttaacacacatttattatctcagtttccattggtcacaagtgtgggcatggcttagctgggtcagggttccacaaaactgctgcaatcagagtgttggccaggttgtgttgttatctggcacttggggtccgtttgtggttgtaggactgaggttcttcctaatccatccaagaggcagtcttttttaaatttttttgaaaacagggtctcactccattgcccaggctagagtgcagtggtgcggtcatgggtcactgcagccttggcctctcgggctcaggtgatcctcccacctcagcctcctgggtagctggcactacagccacacgccaccacacccagctaatttttaaacgtggtttttttttttttgtagaggcaggatcttgctatgttgcccaggctggtctcgaactcctgagctcaagtaatccacccgcgtcagcctcccaaagtgctgggattacaagtgtgagccaccgtgcctagccctaaggtgtactcttggcttcaagaagctattcacagtttcttgccatgtggccttttcacaagccccctcgtatcatgacagtatacttccagaggccaataggaagctctctagccccagtcagccaatacagagtcttacacaacttaataaaattgtgaggaaaaaaataaaattaaaaaatcatgggaataacttcccatcatttttgctatataatataacctaattaagagtgactatcccagaaccctttccatattctgttggctagaagcaaatcactggttctgccctcacttaaggggagagcattacaaagttgtgactctctgtatatcaccttagggtgtgtctgccatactcctattccctatgaaaagagatgatgatctaaatgacctacatagatggctcttccaaaactaaaactatgcttcaaattataggaccttaaattagaactttatagttttcttttacattaatagtctaataagtagaagttatttagtaaataaaaatttaaatgttctaccttatagaaacgaaacaacctatttctgcattattttgtctatttcatttgacttcatatttaaaaaggttaagatcattgagtcagaaaagtgatttgagtgggaaaaagaaggcagtgacattaattttatgatactaaaattttttcttaaatttgagaaagattatggaagtaaaagttaaaatacagtttaaaatactaacataagactttgcagtctcaatagcagggtttggctttttgagaagaaggaaaatgtatgttagagccaaaaatatgactcctttggctgtgaccaggatttcctcttcccaccttagggactagaaagtagaggtaggaaaatttcattttggagccaagtgtgacttgtttagttcaagtcataatttattgcacatacctgagggacctgaaaataaagaaacccactatgaaatgttgataatgggctactctgaaggtaagcattaagctaactttcccagtgaggatttttttcacttccacctttcccagatgcttctgatcattcataaggatatacttaatcgtataatagttaaaaagaaaactttctgtgcactaaaccaaagcatttgaggggcatgagaatgaaccaaggcttttatatgactagatgtcgatggaaaagtataactaaaataaaagttgttttctttttcatgtaattaaatcacagtataacaaggctgcctttttaatggatatctaaagcaaatcctctggccaattactgtgatctaacaaccacaggagtattcagctttataattgaggcatccacctctccaattggtgacatggacatagtttgtgagatatgataaggtacaaatatatttaggttttaaaattgcattttatttgtattgcctagcatagtatagtataatagtatatagaaaagttctccttcgtaggtattgttcctttacttctctgaagaaaaatgtataaaaccatggcatatggctaaaaatgtttatatttttaaaatgttgaagtggtgtgtttagatttttataattggtttaataaaatttgatggtacttttcattgtcagaagtgcccttacaatgattaaaataatttatcatgctaataaattttatatttgtgggtttttttggtaatatagtatgttgagttaccaaactagattttatttggaaactatttaaaattcgcatagtgatctgaattgtctatcttactattagcatacaataaccattatgagttcctttttttgtttaggaaacttatcttagctctcaatgtaccaaactatttgggtatatattattttaatcaattttttaaaattacatttatgattgaaaaattcagacatctattttagttatattagttacttatcgactttataacaaacacacacaaaaaaattgataggcttccatgcattgttggcattttataaaccacagaaaaagggtgctttccctaaaggataacagcattaataaagtaataaagcacattaaaccatgttaaaccagtgctttcaactgtcaaaatattatcagatgatggtagtattggaattaaaaaaaaattttttttgagacagagtctcactatattgcccaggctggtcctgggctcaagtgatgatcctcctgcctcagctcccgagcagctgggattacagactcgcgccaattgcacctggctgtattagaattcttaaatctaacagatttctttttaaggagaatgatattgttccattgttattccttttgctttgacggcaatatgaatattcacgagaaaatgaatgagggcaggaatgcaaaggactgtagtatatcaagaggaacttgacttcagaaaccttttaggtagattcatctgttccttttgaatagatttataaatcccttttgaattactcttctatcaaaactatgttaatgacggccgtgtgcagtggcttatgcctgttatcccagcactttgggagcccaaggtgggcagatcatttgaggtcaggagttcgagaccagcctggccaacatggtgaaacccagtctctactaaaaacacaaaaaattagccccggtgtggtggcacacgtctgtaattccagctacttgggagtctgaggcaggagaatcacttgtacctaaggggcaaaggttgcagtgagctgaaattgcgccactgcactccagtctgggcgacagagcaagacactgtctcaaaaaaaaaaaaatgttaatgatattgaatgttttgtcatgcacttattcattcatttaacaaactttttttaagagcttaatttgtacaaaatgcagtaggtgtaaaaatgaacaagatgctgtctctacactagtaatgtcaataatttatggaagaacaggaacatataacaagatgctttggtggaatagaaaccaggtgctcagatgcttaggaaagctgaagttgaccaacacctttcgcctcccttgcagataccaatttactttgactaacttgcctaaaagggatggaggagccagagagatgagatttgaatcttctctacagtgagattcaaatatacaaacatttcataaagtggaatggcctcatcagaggttagattacaacaaaactattcagattataaaactattcagaataggccgggtgcagtggctcacacctgtaattccatcacttggaggccgaggtgggtggatcacttgaggtcaggagttggagaacaacctggccaacataatgaaactctctctctctactaaaaatacacaaattagctgggtgtgatggcacaatcccagctatttgggaggctgagacactagacactagagttgcttgaacttgggagggggaggttgcagtgagccgagattgctccactgcactccagcctgggtgacagagactctgtctcaaaaaaaaaaaaaaaaaaaaaagaaagaaagaaagaaagaaaagaaaaaaagcaactattcagaataataaagcaaccttttttttttttaatatctggctagagcaccaagtattataatagactcaggggacagagtgatacacaacacagtttatagccccttgtctcatgttgcttatagtctagcaaggaatattgacattaatgtaatgaagaaacaatcacagttgtgataaaggctataagaaaaagtcacaggaaccctgggaatgttatagcaggtctttggggatcaagaaaggcttcctgaggaagtgatatttaacctgacactggaaagaaaactaggagttatgaatgtgtacagaatggataagagtattctcaacagagagaacagcatgtgttaaggttctaaggttgaaagaggatagcagtttccaagaactgaaagaagctgaagttgtgagtctgagagaatggcatgtgaatagaagctgggagaggtatttaggagccaaatcacttaggactctgtatgccattttcaggatttgggacattctaagttatgggaaaccagatccaggaatacagcctgaggtcagagtggagtggacttctggttatagtgttgcatctgatacagagacccacctggatatagctctgataataatacatggttacccaggggaaatggatgtgaatataaacttaaagtgctgtaatacttaactctttaacatttacaagttcagcaacttgctcttggaatttttggaaatacttaggttccatcacagatatagaagaaaaaaccttgtcacctctaaaagtctagagtgagtatatcctcaattacttaaaccttttttttcctcctcagagtatttttttccccagcttttttttttttttaagatagtttggccaaaagtattttgaaagcagtttctaagtatatcttgaaattccaaaattaaaacctagtttaaatctaagtaagctgtctaggttaataaattgtatatttaccttggccagcaaaaaatgagttaatgaaacccctctgtttccatcccttctgaaaaacaaatgaacaaacaaaaaaacacaaaacaaatggatgaattgctgaggttaatttttaaattctccatatttttaaaagatattttgggatcaaggatggaaatatttaaaatcccaaaattttaagcaagttcggttgataacctttttctcctaatactcatgtcattgtatttccttagcaaaaaataaataaataaatacataaagccatgcctgaaaatattgctggaagtttctctggataattaataaataaaaacttttggttttgatttttgaacaattctgaagttattttcttgtgttcatcttatttttggtgagaaaaggaactttgacctttatatattaattttgctctcaaactaggttggaggatttaaaagtgaaattatcaccctgaggacttgtaaggttgattgacacttacctacttatgttggcatggagcataatcagcagctctaccttaagggcagtggtgggattgttttttagcttctctgaaaataactaatttttttcttttgaggagaattttagttgtgaattttaatcagtttattcagtcaaattctctcaatgcctacagattgtagacatgtagaggggcttcaggtgactatgtcacttttttttctaactgtaaagctttaaggtctcaaataacataaactgtagtagatattgctgttccatgtttacaacatcactctttcctgtttttccctaggattaaaggcttgaaagcttgggaatgagttcagtttatactttgtaactgtaggacacatcaccccagtgcgtcagtgactatagtaagctatacaaataactcagtgtattttcctactgcatcaagtataccagatttgtgacttgaaattactttcaagctgtgtttctcaaacttggcactattgacattttggactgggtaattctttgttccgaggagtgtcctgtgcattccaggatgtttaacagcatctctagcatttacccactagatgccggtagtgggatctagacaccccccacggtcaccctgccaccagttgtgataacccaaaatatctctagacattgccattatcttctggttggcaaaattgctctcggttgagcaccactgttttacatagtgaggcatacaaatgtatacaataaattaaaattaataatctgcatttgtttttaaattatgatttatcaagttgaaaaacgtccaataaagcacttaccaagagtctaatatacactaaatacagtagatagctttttcttataacagtcttttggcctgcaccccacttctagcccctgcttctgacaggcagtgactttcacttctttagctattttatctggtatttacctccatattttatctttatttaatcagttttagacatgaactattaaattcctatttgagacaggattttacctcacttactctgctttttccttcttatagcctcccaagatagttacattacaatttttaattaaatctatagttattatgtacattatcatgactatgaaaatactgttcactgtaatcaaatgatttcctttcttttttgtttgtttgtttgttttgttttgttttgtttttgagacggagtttgcttttgtttcccaggctggagtgcaatggcgtgatcttggctcaccacaacctccacctcccaggctcaagcgatcctcctgcctcagcctcccgagtagctgggattacaggcatgcgccaccacgcccagctaatttgtatttttagtagagatggggtgtctctatgttggtcaggctggtctcgaactcccgacctcagaagatccgcccgcctcagcctcccaaagtgctggggttacagccgcccgtcctcctttctgttttgaactttagggttgatagaaccctcctctcttccacttcctttttctctttttaaaagatctttatctaaataaatgtgtcaccttccaatagttgtgtgccatgcctctcaatacagtttttctatcagacctgtcagataacaggccagttccttttttctcctggagatatcatttctggagcctcctgatcttctacttcggtcagggctaaattgctcatcaagcccagataactgccaatatcctgctatcatccaataactgctatcatcctaggaatttgatttgtctgtcttctgtgatggattgccagtttcctgggtctcagatcttcctcttgtttcttgcttactgtttcatctttgcggtacacatcctcccaacagtttccttatacctccatttcctgagactttctgaactcctgcaggtcaaactggcttatgtcccagcagtagctctgtggatacgttggtttgaactttctcttttctgcttagtcatttaacatttgtccatctaccttttatgttcatatattggggcttggaatcagatgtctcttagctttactgaagttggagactgtgtttctgtttcctatttgtcttttaatttaaaggcagtttctctgacaggtgagggaaaaagaaatgtctggggttttttttttttttttgacttattgaaatcagaagtctgcattactttctaagataaagcatgagttatcaaagtgctatgattccatatgtcttattccaaaactcacattcacatttgaaaagctctgaatcaaatattcttggcaataatatttcaaaggtagaaagtgatcatatattttaaaaatcaaacctttgtggccaggcgcggtggctcacgcctgtaatcccagcactttcagaggctgaggcgggtggatcacttgaggtcaggagtttgagaccagcctgaccaacatggcgaaaccccgtgtctactaaaaatacaaaaattagccgggcgtcatagcacacacctgtaatcccagctactgtggaggctgaggcacaagaattgcttgaactgagggagcagaggttgcagtggccaagatcatgccactgtactctagcctggacaacacagcaagactgtgtctcaaaaaaaaaaaaaatcaaacctttgctcatgtttgaaagattatatatatatatatagagagagagagagagagagacagacagacagacagacagagtctctgttgcccacaatgaaatgcagtggtgagatcatggctcactgcagcctcaaactcctgggctcaaatgatcctcctgccttagcctcctaagtagctgggactacagactcctaccaccatgcccagctaatttttattttgtagagacagggtcttgctatgttgccctggctggtcctaaactcctggcctcaagtgatcctcctgcctcatcctcccaaagtgctgggattataaacgtgagccaccacacctggccctgaaatataatttggatgtaataataaaaatctagatagcaaaagtgttatacttcatcttttggactgtggtggtaataaagttttaagtgtattttcagcattttccagtactcatttaatcttttttcttatgtacatgctcgctcttgcttaggtttgtttttagatgttagggtttaatcatatgaaagctgagtctgagcctcctctcactgggattaacttttactttttatgctactattgccaggaacctttatataattccctgagtgccattatgcgtcatattacatcttctggcatccaaaagcctcttccatgagcaatcttgcctttttccagtgttatataaggtagaagtaggtctctgtcacctgctgaatgcaccattactgagtccccttattaaatcctcttaatattgactcattcctttaagaacctctgattctatttactgctttcttacataagataatattttattttgttagttgttattgctagcaaaagtttattcacagttatcgggctctcatatgtgactttaacaagaaaaactctagattgtaagatatttgaataaaataatatttagactaatatggtaccaatcatgcactcattctcatagattacaccactagcatattttatatagttatgctttcaaaaacacttcataagttgaaaagtgaccaaaaagtattatggaggatattaaagagtgctaatgttagctaaaatttcttagaaaatttaagatcaattgtagaagttattttttaaaatatttgtttcaaaactgtttgaacactgttctgtatgtattctgccaatgtatatattttcattgacacttgatgaaaaagtagccactccaagaacccaagaaacttactttttaagtcacctaaagttatgtgccaaacattgaataatgtagtcagagctctttcagaaggaatcggtccaggtggtaaaatgatttggggtgaactgactaaggtaatgactatatggcctccacagccttatggcttatttcacataccatgcagcaatatattacgacagcatttaaagtccactgaaacctacactgggtttcagaaatatggggtaagtaatgactttctcgtccacttacctctagtatctgatgctttactgtttcatgcatattgtcatttatttcttcaaccaattctctaaggtaaggttggcacacagtctccaacttcaataaagctaagagacttctaattctaagccccttcttacagacgaagaaattgagaaaggaaattataaagggctactgtgacttgtccaaggtcaaacaacctaagtctcaaggccttgattccaagccgtgtgctttttctttttttccattataccttcttcctcaaaataaactataacacgaatggtggcatgttctagagatgataatttaaacatttgcaggtttgtttgagtaatattttaacatggataacctacctaaattgacacaaaggtcattactcttaaaaagaattttttaggccaggcatggtggataacaccttaatcccacagctttgggaggccaagacaggaggattgtttgaggccaggagttcaagaccagcctgggcaatgtagtgagactgcgtctctaaaataatttttttttttaattagcctggtgttggggcacgtatctgtaagtcctagctactgaggaggctgaagcagaatgattgcttgaacccaggagttggaggttgcagtgacctatgaccatgccactgcactccattctgggtgacagagcaagaccttgtctctaaaaaataaaaatgaaaactttaacttagccctttacagaataagcatgctaagatttcttgcatgtcttagagtattaactttttaataggaaaaactggttatatttttataaccagttgaggctgaatatgttgagaagaggagatacctgatttcagagggatatattttgttctatttcttaaatttgaaatatccaggttattttagtcaacactgacaattagcgatactaagtttaatatagatttctctaccaaaaaaagcaccttatccaaaacagtcttaaagcatatgtgaaatatattgctgttactatgtcttgatagattattgtggtcaagttgtaacgtaacagggaaagtaagtaacaactaaaaaccatttctaatgtgcttttatcattattattcttatttaaaagggagcctggcttcttaactcttggcagaaactaactcattttccccatttaaaaaaagtgtatatacacacacacacacacacacacactatttggttaactgtgtcagaaatcttgaaaatatgccagatgaaataaaaccagctatattctttttaatctagctaaattatatcacatacaagatcttatgctgagtttataattctaaccattggaatttatattgtgataccctgatagaagtgtttacactatgatgatacggagcagcaaatgtctctaatgcacagtctctgtcttccagatttggtttgctgtaaatgtttaggctttaggccctgcaccttggctaaagataaaactgttctactcaagtgtttgctagacaaatgtgtttatttttctgaagcagagttttcttaatatttttataattatgtagtttagctgattatttgtccttagtctcatttggaggcttgaacttttgtcttcaagcttacatacaagaaaaaaattatattcttctattgattgctttcaggaaggcatttattactgaaatcataatatgtattggtatgagttgggataaaatccaccatctttcatgtgaagcagcagtaaaatgaagagatgcatttatagttctagctcatatttatcacaccatttattttttcagaagctactgataaactttaaaaaggctacttttgtgcaaagagtttgactgaaagttgaaaaagtctaatgttaataattgtgaccttaatttctcgttgacatatgcagtataatccttttgattatttcatattgtctattgctgctataagtgctctgctacttatactgtttccaataaaaccaaggcatggagaacttaagaaactttctgttcaatctcaagtacattatgatataatggtaaaaatcagaatccaaaatcatataacttctgcttgaatgccatctgtctattgggtatttttacccaattctaaaccgcctcagtcttaattatcaatgcctttgatattgaggatcttatttctacttatgtcagttaggttagattttgatgcagatatatatttatttgtctaaaaactatcatagtaagggagctttacatttggtacaaacttgaccttcaattatgaaatgataaatttttgtgaatctatgcagcatctgaaccaatgggttgcaaactcaagcagctacatgaattaaacaggttatttaaatgagtgggttagttgaggacagtggtgagatagccaaagttttagatggtagcaaataaattttaattattttaagccacagtaagggccacacaaaacacaactatgggccttcagtttgcaactgttaataaaatagtttgtctttttcctgctcttcacacccctccaaaattacacatacactaatttattggggatgggaagcaagtagtttaactgtttccaaaaagtacaattaagtatagctttctattttgggaaaggcttgtaaaatgtatttgaaaagtaatgttaactgatctaaaagatcatcttcccaaaccacacttgagctcagtttatggtgcttactttctgtcaaaacttagaaaaaacattcacagttaacttccataatgtaaaatgtctgtctcattaggcattaaggaagcattggtcaacaggtataatgttgttagattataaggtaatgtgaatgtgggcatgacctcccaaatagatcaaagactaatctctttgacagttacaagatggcagagcttgccttgggccttttgctggtggtgcacattgaaactatttgtttggaaagcatgcctgagagataagaatgtgtttataaggatgagcaggtaaaagtaaaaggttgtcttttgacatttcaactaatcccttccagcctttggtttacttaacatttaggctatttgctggcaggagaaactggctttttcacatatgctgtatgtcattttaaattggtcattgattttcatgcttgataatccctaagtgtacaatgaaatagattctgatgtcattaaaatgaggtgtactcactttccaccttttcttaacccttagttttgctttttccaattaactgtgatctcacaaagtaatttttattattgattaattttaaaaatctgtttatgtaataagaactatttcaaagttaacctttatatacagttcatttcagggttttgttttttgtttgggagttttttgttcttttgtaggtttttaaactttttatctaaaataaattcccctgggtaaaatattggcagtattttaaaggccatttggagtgtaaaaggtgtttgaaaatttgcaataaattaaaacaatgtagccatacagaaaattttaattatgttaatgaaaaatagaagaccaaggagtcataattttatttaatctaatagttgctacattcactctaaatattccatttataactaatacgtcctagagcaactgttgtcttcggaacagtgaccactataatgtatcagtctgtccatggtgtaggaaattttgaaaacacataagctattatgtctgacaaagtagatgtcaactttctttgaggaaaatattgttaaagaagagaagctgctttagttacatttttgagagataggtaggaaatacatatatttttcccagctggacagaattttaaaagtactttttcttatagtcttaattatcatgtgctttattgctgaatttccagggagggtattaacatatcatctaatatttactatggtgttatgttatcatttactacttatgttgccctaaaaagcaaagttgggctgggggcagtggctccatgcctgtaatctcagccctttgggaagccgaggcagagggatcaccaggtctggagatcaagatcacctggctaacacagtgaaacccccctctctactaaaaatacaaaagaatagctgggcatggtggcatgcacctgtagtcccagctactcaggaggctgaggcaggagaatcacttgaacccaagaggcagaagttgcagtgagccgagatcatgccaccgtactccagcctgggtgattgagcaagactccgtctcaaaaaaaaagaaaaaaaaaaaaagcaaagttggctaggcgtggtggctcacacctgtaatcccagcactttgggaggttgaggtgggcagatcacctgagatcaggagttcgagaccagcctagccaacatggtgaaaccctgtttttactaaaaaacaaacaaacaaacaaaaaatatatatatacacaaaaaattagctgggcatggtggcgtgcacctgtaatcccagctacgtgggaggctgaagcaggagaatcacttcaacccaggaggtggaggttgcagtgagctgagatcgcaccactgcacttcagcctgggtgactgagcggtactctgtccaaaaaaaaaaaaaaaaaaaaaaaaggcaaagtctatgtcctttatatgtcctttatattctagttgtaaagtttcattttagaaatttgacagattcttttgagggaatgtaaaataaaaagggtggggttttgggtttttagattttggccaggcacagtggctcacgcccgtaatcccagcactttgggaggccgaggcgggtggatcacgaggtcaagagatcgagaccatcctggtcaacatggtgaaaccttgtctctactaaaaatacaaaaaattagctgggcgtggtggcacacgcctgtagtctcagctactcgggaggctgaggcaggagaatctcttgaacttgggaggcagaggttgcagtgagccaagatcgcgccactgcactccggcctggtgacagagcaagactccgtgttaaaaaaaaaaaaaaaaaaaaagcttagattttatttttacagtaagataaaattttttgacctcccaatttgaaagctgcttttcagaagtgtactgttctgttttctttcctaaagcatgttcttttatttaaaaaggttaatagtggctgggcacagtggctcacgcctgtaatcccagcattttgggaggccaatgcaggtggatcacctgaggtcaggcgtttgagaccagcctgaccaacaatgtgaaatcccaactctactaaaaatacaaaaattagctaggcatggtggcggccgcctgtagtcccagctacttgggaggctgagaggagaactgcttgaacctgggaggcggaggttgcagtgagccaagatcatgtcactgcactccagcctgggcaatggagcgagactctgtctcaaaaaaaaaagaaaaagttaacagtgttatagagtacacggaaaatactttgttttttcttgagtaggtttacaatttagtaaagtattattaagtaaaatagaggtcacttgaacctaagcactgcaataccatgacactcgattagacctagacagctactaagtaactactaactgctggtgggtagtatgtacagcatggatatactggacaaagggatgattcacatctgagtgggatggagcaggatatagcatgagatgtcatcatgctactcagaacagtgggcaatttaaaacataaattatttctggaattttttatttaatatttttggaccacagttgaccgcagttaacttaaaccactgcagataagagggaactgctgtataagttttgttaatatatcttgaaagcctaaaatgtttccaagaagtttactctttattttattttttagttgacagataattattgtacatattcatagggtacatagtgatgttttgatacatatgatgtttattgattagatcagggtaattagcgtatctgtcatctcaaacatttatcatttctttgtgtatggaacatgtaatctcctccttctagttatttgaaatgatgtaatattgttaactatagtcatcctactgtggtataaaagattagaacttattccttctatctagctgtaactttatatcctttaacaaatctcagccagacgcagtggctcatgcctgtattcctagcactttgggaggtcaaggtgggaggttttcttgagcttatgagttggagaccatcataggcaacatagcaagaatccatctctataaaaattaaaaaagaaaaaaattggccaggcatggcagcacacacctgtagtccaacctacttgggaggctgaggtgggagaatcacttgagcccaggaggtcaaggctgaagtaagccatgatcgcaccactgccgtccagtctgggggacagactgaggccctgtctctcaaaaaaacaagacaaaaaacaaatatctccccatccctcccttccttctccccttcccatctgctagtatcctctgttctactttttatttttatgagattaacctttttttttttttccgagacagagtctcactctgtcacccaggctggagtgcagtggtgcgatcttggctcactgcaacctccgcctcctgggttcatgccattcttctgcctcagcctcccgagtagctgggactacaggcgcctgccaccacacctggctaatttttttgtatttttagtaaagacgggatttcaccgtgttagccaggatggtcttgatctcctgaccttgtgatccacccgcctcagcttcccaaagtgctgggattacaggcctgagccaccgtgcctggccgagattaacatttttaagcttccacatatgagcaagaacatgtggtgtttaactttatgttttttatttatttcacttaaggtagtgtcctcagttccatccatgttgccgtgaataacaggatttcattcatttttatgactgtttagtattccattgtgtatatataccacattttctttatccacttatctgttgttggatacctaggttgattccatatcttggttattgagaatagtgctgcaataaacatggggggggggcaatgtctcttcaatataatgatttccttcaagaaagtaactccacatatctttatttaggcttctactacaaaaatacacaactggccctctgtatttatgggttctgcatctgtggattcacctaagtgtgaatcaaaaatatttgaaaaaaaattgcttctgtactgaacatgtacagatttttttcttgtcattattccctaaacactacaatgtaacaactatttgcatagctttacatcatattagctattaaagtaatccagagattatttaaagtataaaggaggatatgcataggttatgcaaatactaagtcattttgtatcaagtacttgagcatccatggattttggtatctgagggaagttctgaaaccagtcacccatggataccaagggacaactgtaccatttgatatacttgtcctggaatactacaattgcaccagattattacctggagacaattactaggccacagttcagggagaataaactcaaacagagctcagtggtcacactgagttaaagagataaagtttagggaaagtccgtggcagctagaatttgcaaggtagagtactagagaggatggagctacatagagagaaagctccaggtatctgcataggcgtccccttaagtttttggtcaagtactgattggcatatacatgagaggaagctacataaggccagggaaatgagtaggcagaaaacttcctagtgcttacaaagtctgggaatagtttgagttcccagcagccagaagagaaaaacttcataacacatggggtacttgaaacaatcatcagtagagtttcacctttgtatgggggataaattagccctagactaaaggctgctcttgactttccctaacaaagctgccaaagaatgaactggttccaagtaccctaattgcattcacagcaaaatccagtaaccactgacttaatgcccacaatgtctagtatccaatcaaaaattagcaggcatgcaaagaagagaatttaacccataatacagaggaaaatcaatcaatagaaacaaaaccagaaatgacagagatgttagaactggctagcagacaaggatttttaaaatatcttatgttttatgctctgtaagttcaaagaagatagcagaaaacataagcatactgaaaagagaaacagaagctattttttaaatacctatgtgaaatctctctatatgaaacaaaaaatacactggatggattagacactgcagaaggaaaatttggtgaacttgaaatcttataaataaaaattatccaaaatgaagtgtagagtgaaaaaaaagagggtcagtgacatgtggagtaatataaagtagtctaatatagttgtaattggagtctaagaagaagagtttcgaggcagaataatatatatatttagagaaataatggctgaaaatttttcaagtttgatagaaactataagcccacaggtccaagaagcttaataaaaacgcaagcaaaatacacacaacagcacactgtaatccaatccaaagtcgctaaaagaaaggggaacattacagagataggacaatagcatattttttcttcagaactatgcaaatcagaaaacaatgaaaagccgtctttaacaaaagaaaaaacctgtcaatttagaattcttgatcaagtgggacaatctcttaaaaatgaagatagtgaagtcttttcagaaaaagaaaagttgaaagaactcattgctagcaaacgtgcactactaatattaaagaaagttcttcaggtagaaggaaaatgataccagatggaaatttaaatctacgtgagaaaatgaagagtgccagaaatggtaaatctgtgggtaaatacggtatattttaaaagataatcttttgggacaaaacagaaatctgaataaaatacatagattatttaatactaatgtactaatgttaatttcttaatttgacatgagctatagtaatataagatgttaacattaggggaaattgggtaaagggtataaggaatctctgtactatctttggaacttttctgtaaatctaaacttatttcaaaattataaacttatttaaaattaaaagataatgtactgtttaaagcataatcaaaatgttttatgggtttatagcatgtataaaactaaaatgtatggcagcaatagcataaaggacaataaaaggaaatggaagtatattgtggtattgtttttacatcatatgtgaagtggtaaaatattattttaaggtagactaataaggatgtatatcataaaccctagaggagtcacacacacacaaagacatagctaataatccagtagtggaaataatatggaagcatattatttccagtagtggaaataatatggggggaggggggaacttgattgatccaaaagataaaaacaaaatggtacagattgggggggtaggggggaagcaaggtggtagtcttaaacccaatcataacaataactacattaaatgtaaatggtctaaacattgcaattaaaaagcagagattaccagactggataaacgtaaaagaatgaactactcataaacctttcaacatgaatgaattctaaaagtatattaaatgaaaaatgtcacaagtcattacatagtatatgataatatttatatgaaattctataaagggcaaaacagaaagcagatcagtggttgccagggccagcagtggaagaaagaaatttactataaagggataagagggaacttttgggggtgatgaaaatgttctatattatgatggtggttacattactatatatgtcaaaactcacctacttgtacactgaaaattgtgtggatttaatgaatgtaagttcaataaaactgcttgagatcacacagctgattagttatatgcattaggtaatttaaggaatgtgaagctaaataaaactattttaaatgaaacgaaaaaaatcagtactgaaaaacaaaataaaatctctaccctaaaaatatgtatattcaaactgttagaagttaatatgatgtttaaaatgagctttaattatctactaattttttaaatatattttaaaattattaggttgaactaaaacgacaatacaatgaccaccattcaaaattgagaggtcttctacctggccgtcagtggtatgaaattcaagcatacagggccttaaaccaggcccttggtaggtaagtggagtgaaatttaatataatattatctgtgacagggctatatatataaatctagtcttgctactttactctttataataaacttggtaaaattttatttaactggaaccataggaactggtatgtattcaatgatagctgtcacaagtagaatttgaaaagagtaagaagaataagttattcccaaaacaaaactcacaatttgctaaagtttaaagaaattttgtgattgatctaacaatgaatagcacacaaagatgctcagtaaatattaaagaaagcttatcaaatcaaaaaagttttgtcttgtgaacatcaaagctcagataacaattttatagataaacagacctctctcctcacctcccccaaaatgtcagggaagaaaattgatataccagccagtgtgaggagatattctatttgaaagtgtactttcagtacggaatctgtgtatctgttaaaatatcatcaaatagaaacaaaatctattttactgcccagtgagcttctgtagttgcacaatttttcattctgcttctatgtaaagaagacatctgacagaaaaaaaaatcattttcattttaatgttatttgtaagctttagataacaatgtgattacaatctatattttcttgtgccttttatgtatagtgataatgttgaaggataacattgaaactgaaggatatttaataattaaagaaaaaataaaataattaattattattattattattattgttttagacagcctcactgtgttgcccaggctggagtgcagtggcgtgatatcggctcactgcatcctccaccgcccaggttcaagcaattctcctgcctcagcctcctgagtagctgggattacaggcgtgcgccaccatgcccagctaatttttgtatttttagtagagatggggtttcactatgttggccaggctggtctggaactcctggcctcaagtgatccactcacgtcagcttcccaaagtgctgggattacagatgtgagctactcgggaggctgaggtaggaggatcgcttgagcctgggaggtgggggttgcagtgagccaaaatcatgccactgcattccagcctgggcaacagagccagaccatgtctcaaaaaaaaaaaaaaaaaaattagcaaatcattgaagaagggttaaaacaaactataatcgtgatcctaaagaattaacaccaactaaacatttaatcatgatactccgacttctaaatattcttgcccattaagatttgtgctttgtgagactcatttttaaatcattattttatacagtcatgcatcacttaataacggatatattctgagaagtgagttgttaggcaattgtattgttgtgggaacattataaaatgtacttacacaaatctagatagtatagtctactacacatataggctatatgatatagcctattgttcctagatcacaaacctatacagcatgttactgtactatagacaattgtaacacaaggataagtaattgagtatataagtgtagaaaaagtacagtaaagatatggtatagaaatacagtatattaaaaatggtacaaatgtatatggcacttaccacgaatagagcttacaggactataagttgctctgagtgagtcgatcaagtagtgagtgaatgtgaaggcctaggacattactgtacactaactgtaggctttataaacactgtacacttaggctatactaaatttatttatttttattttttcaataataaattaccctgagcttattctgactttttctttttgagagatgaggtatggctatgttgcccaggctggtctcgaacacctgggttcaagcagtcctctcaccttagcctcccaagtagctggaactccaggcacacgccactgtgcccagcttgctgtaacttttttactttataaactttttatctttttatctttttttttacctttttgactcttttacaacacttagcttaaaacacaaattatacagctgtacaaaaataatttttatatccttattctataagctttttctatttttgaaatttttattttttatttttttactttttaaacttttctgttaaaaatgaagacatggggagcgcaatagctgaagcctgtaatccagcactttgggaggccaaggtgggcagatcacttaaggtcaggagttcgatagcaacctggccaacgtggtgaaaccccatctctactaaaactacaaaaattagctggatgtggtggcaggtgcctataatcccagctacttgggaggctggggcaggagaattacttgaacccgggaggtggaggctgcagtgagccgagatcaccccactgcactccagcctgggcgacagagcgagactccatctcaaaaaaaaaaaaaaatgaagacataaacactcatgtagtatcctaggcctacacaggatcaggagcattaatatccctgtcttctacctccatgtcttgaatcactggaaggtcttcaggaccaataaataacatgcatggagctgtcatctcctgtgataacaatgccttcttctggaattcttcctgagggatctgcctgaagctgttttatagttaactttttttttaatgtaagtgaaaggagtacactgtagtgataagaagtacagtatagtaaatacacaaaccagtaacacagttattatcattatcaagtattatataccatacataattgtatgtgctatacttttataagactagcagcacagtaggtttgtttacaccagcatcgccacaagcacttgtaatgcattgtgctataatgttacaatggtgacatcactaggtgataggaatttttcagctccattataatcttatgggaccactatcatatatgcacttcacactgactgaaacatcattatgtggtgcattactatcccttaatttcatattgtagggcatcaacatctaatttgtaaatgctataattaggttttgtgcaaattaaatttttttttttttttttgagatgaagtctcgctctgtagccaggctggagtgcagtggcacaatctcagctcactgcaacctctgcctcctgcgttcaagcaattctcctgcctcagcctcccaagtagctggcactacaggctcgcaccaccacgcctggctaatttttgtattcttagtagagatggggtttcaccatgttggccaggatggtctcgatttcttgaccttgtgatccgcctgccttggcctcccaaagtgctggaattacaggcgtgagccaccacattcggcccacaaattaatattttatattctctatgaaattttaattaacttcaccatgtaattatttatttcctagtgaagctgtaaggcatttggataattcatagaaacaggttgggccaggtgaggtggctcatgcctgtaatcccagccctttggtaggtggaggcgggtggatcacctgaggtcaggagtttgagatcagcctggtcaacgtggtgaaaccccgtctctactaaaaatacaaaaattagctgggcatggtggtgtgtgtctgtagtcccagctactggggaggctgaggcaggagaattgcttgaacctggtaggtggaggttgcgttgagctaagattgcgccactgcactccagcctgggcaacagagggagactccatctaaaaaaaagaaattggttaagagtaaaatcatgaaaacatgatcagttgacatatttgcacttcaaccagaagtcccacaactaatcataatcttaaccagtcaaataaaaaatttttatttttctggtgtcttgtgtatttacattagcccatttgtaaaccagatggcatgtgggttcagatttgtgtatcgcttagacatagctatatgtatatatatacaaatacataagctatgtgtatttgtgtatagcttagacataagactacaacaactagatttaagccctagaacatgtcacccactgtactccccatcattttattttttatttttgtttttattattattattattttttttttgagagagtcttgctctgtttcccaggctggagagcagtggtgcgatctcagttcactgcaacctctacctcccaggttcaagcgattctcctacctcaacctcctgagtagctgggattacaggcacatgccaccacgcctggctaatttttgtatttttagtagagacgggtttcgctatgttggccaggctggtcttgaactcctggcctcaagtgatcctcctgcttcaggctcccaaagtgttaagattacaggcgtgagccaccacacccagccactccccatcattttagaatggtattctgcatgtgtttttcttcaaactgagtgattcaggtctatggttaagctacagagatcctgctccccttttttccctagaaatcccattttacttggaatcaagttgcactgaaggttattgaagcatcacatctgcttactttgtgtctccctgctgattgacattttttttttgaattttaatattcagctaatagtttctaggggcgcttgaatatatttttgaaattgttgacttttagtcattatactcaatttgcggaaaataagtattcttagctcagttgatttttttcttccttttagtataagcaatgccttgaatttcaagaaaccatgtgaaacagaagtcatatttgtatgtggttttctcgtttacaaaccttctccacatatattatctcatttgattcttctaccaatcacttccagtagcaatgcatgttgctacttgatgttttatttgatttgctttgtttttgtttgtttgtttgggtttttttgggtttgttttttttttttttttgagatggagtctcgctctgtcgcccagtgcagtggtgcagtcttggctcactgcatcttcctccacccaagttcaagcgattctcctgcctcaacctcttgagtagctgagattacaggcacgcactaccatgcccagctaatttttatatttttagtagagacggggtttcaccatgatggacaggctggtctcaaactcctgacctcagatgatccacctgcctcagcctgaattgtttttaaactggttgtgagaaattaaattatttttctaaggccacatggctactaaatggccctttacatcttgttcccatccatttctaaaactgtaatacctgctttttcatccttatcctctacctctagccaccgaatttttcactattaaacataagtatgtcagtattaaactatcaaacatgctatattctttcattatgctttgccttggcttataagttatcatacaattcgtttggcaaatttagcaatcaaaacctcattgaaagtcatgtcctttatgaggacctttaaaacttctccaactagagttatttataccttagtaaacctatagcattttggttgctatctgtattatagcacatatctcattgtattgtaatagcctatctgttttcttccttgaacatgtgttacgttgttacattctcagcaaccaactaagtctcaaatgcttgttgaattagtgaaaaatgtgaggttcagtgctttttcctgccatacaacattgcccagagagcttttagagcttcaaaacatgctttcctggaatatcataaaaatcatgtatttatagtattgatatataatactgtacttttagaattttattaatttttttaaatggagagcccagctatcattttactgattttcagggaataatgtcaataattaataatttgttacaaaggaacttaccctttaaaaccaatcaataagtaaaattttttaaattaaaaaaataaagaccaagcaaatgttttatgttatttaataaaactcataatgtatattgattgacagaaaaggtgcttatactctgaggcactcttcttgtaagggatacagaagatctaaagtaagcagaaaccaatggattccttttaatgttaatttttttaagcacacatgggactgttagagtatttgaagtaatataagtctatgaaatacaagaacagcctttggaaacatacaagatggttttgcaaccaggttacaactgcactatgagttttctaactagtctttgttgctttactgaaagtataatctttgtctcaagccggcataattcatttaagcaaggcagtttgaaaacaatggtaaaaagaaaaggtgaaatcttttttctttgaattgtttcattaacagaaatacctttctaccataccatagaatgctttaaacataaatcaaactggaaccaaaatacagtggcacactgactttccattgactttcaatactcttctgtagtattgacaatattaatcttcttcctatccttcccagtgttatggtctgttgccttggagcctataggttactttaaaataatatcaaaaaataatgccctataaaatttagattttttttgtctttgtagaaaaattgaacatttatgttactcttcaccccctcaaaatcctatgataataaagaaatgaaaatgtcaaacctacaatattacaaagagagagaggagacagtgacagacaagcgatatcaacacattttgaacactggaaaacagccgaatgactgaatgacttagcaggcaagagaaagctgaaatttaaatctacattgatgatagtcaacaagcactttcagatttatgcatgaaaaagcctaggatttggagcaatctaaaatgtcaatgaaagtaaggtttaaaaacaggtggcttggttgcaaattagtataagaaacaattagcctcctccctcacccaggtttacttctggaaaggttgaacaacagagactctgtattcttcaacaccaggcacagctgaggacgtattaaagatggaggttaatattatatacggggattttacatactgaatgtgagaactccaccccccttttcttttcagctctgagtaggctgacaatcagtcttacatctaccaagcgtgtagaattcctttttagggaaactgaccaccccatgagaaaatatctacaaattggcccagttcctgccaaattaccctatagcaaacttcccagcctataagctctacccatacattcagagctgccaatcagtgttttagtgccttactcttaagtaagtgcagagtcttcaccagattgtcaaagaaagtctgtaacatgaaaaacagaccaaaacaacaacaacaaaacaagtccaacaaagcaaacaaaaacacagcagaagaactctgagaaaatagaaacaacacaacagactagaacaaggattggccagtgttttctataaagggccagacagtacagtagtctctccttatccacagaagatagattccacaacctccactaaatgcctgaaaccatggatagtaccaaactctacgtatactatgttttttctatctgataaccaagatggctactaagtgactaatgggcaaaaagagtatacagcatggacatggtggacaaagggatgattaacatcctgagtgggacagcatgagatttttatcatgcaactcagaagggcatgcatttttaaatgtatgaattatttctggaattttccatttaatatttttggactacatttgaccgtgagtaactttgaccataggcaagattgtggctgtgggggactattgtgtatattttaggctttgcaggctacatacagtctctgtcacatattttttgttttttccttaatcctcttaaaaatgatcacttgaggtcagcagtttgagaccagcctggccaacatggtgaaaccccatctctactaaaaatacaaaaattagccaggtatggtggcgcacgcctgtaatcccagctactcaggaggctgaggcaggagaatcacttgaacctgggaggcggaggttgcagtgagccgagattgcaccactgcacttcagcctgggcgacagaatgagactccttctcaaaaaaaaaaaaaaatgtgaagaccattcctacacattggaggctgtacaaaaacaagacatgggctatttttgtaggcactataggctatagtttgccaacccccagataggagaaatcttcaaaaaaaaatcttaatatccatagagatgtaccatattgcctccatgaaacaagaacaaaagaataagaaaaagtgcttagaaattaacatgataccaacaatttttaaatgcataatagggcttggaagataaaatggaaattttccagatcaaaaagagaaagcaggaaagaagaactagaaaattagaggatcagtatgcaataaccaacttctgatacatagaaggctcagatcatgagaacagaaaaaataaaggaaagaaacatctcaaagaaataactcaagaaaatttctcagaattgagtaacacgatttcttggttgaaggggctcactcaggcacaggtaaaggaggaaaagctacaaagcacttcactgtgccctttccaagtaccggggataaagaaaaagtcttaaaatcttccaaagacaaaaagacaggtctctatcttacaaaagatagagaatcagaatcataacagacttctgaaaagcaacactgaaaccaaaaaaatagaagaaattgtcttcaaatattttagggaaatttttgatttgtaacttaagttctacatgagccaaactatcaataaactataagacaaaataaagccttcaacatacaaggacctaaaacatttgcttcaaatggacactttctcaggatgttactggaagatgtgctccatcaaaataaaaaaaaaaaatttaaaaaggaatatcaaggatgcagggaactagggttccaatccagaatagaggcaaagataattcctaaaacaaccaggaaggaaaactctggaatgataacagtgcagcaagtagtctaaattgagttcagaggatagaaggtttgaccatacttggaagaatttttacagctatggcatggtttggggattaattaatgacagaaaacattaaaaattaatccacaaaaagaagaggcagttattaactccagggaaggcaaaaagtcttgtacaataaaggaaatctaattatagtgcactatgtgactcagttgttaatattcccaggaagggatggtgaagtatcagtggtataagagaaataaacatcttccacaggagagaatcagtacgtaagttctaaagttcaaaaaccaagaagtagtagtaggatcaatgttccttagaaatatggagataaataaccagaagatctacctaaaatattgaaagtaattgtttctgaggaatgggaattgtaaacaggaggtgggtagggaaaggacagttatgtttttcattgaaaacataaaactatgtgttcgtgtttctttgataaaagttaaaatttacaaagctaaaattaactttaaaaaatagtttgggcgtttcagtcctagaaaagatgaagtaagcatatttagtagtctaaaaaacctagacagaatatgtggagtagctgtttgagaactctgaaaagtcaacactagcaggtagattaagaaaggagaccagaattcaaaataccaatgatctagctcaagtaactgtataataccagataaagtagaattccaagcaaacaaaattagggataaaagagaacattacataatgataaaagggtgaattcaccaagaagacataagaatcataaatgtgtatgcaccccaaaacagggtttcaaaatacatgaagcaaaaactgacagatctgaagagaaaaatagaaaaatacacaattatacttggaaacttcaaaattcctctcaataacagaactagtagacaaactaataaagatatagatgacttgagcaacattattagccaactcaagtccagtatgttctctgactgtaatggaattaaactagtaatctagtttaaactagaaatcaataacagaaaaatgtccaaatacttggaaattaagcagcatatttctaaataatccacaggcaaaacagcaagtttcaagtaaaattagaaaatattttgaactgatcaaaaatgaaaatacagcatatcaaaatgtaaggactgcagctaaagcagtgctcagatggatatttatgtcattaaatgcttattttaggaaaaaacatcctcaaatcattgatcttagtttctaccttatgaagctagaaaaagaagagctaaataaatgtgaggcaaacaggaaaaaaaggagtaataaaaacaagtataaattgatgaattgtaacaaaaataatgaaatcagtgaaatgaaaattaagctgcttgaactaagagttgagctaccattcaactcagcaatcccattactggttatatgcccaaaggaaaataaatcattctgccaaaaagacacatgcagctgtgtgttcatcacagcacaattcacaaaagcaaaggcatagaagcaactcaaatacctatcaacggtggactagataaagaaaatgtggtacatatacaccgtggaatactgcacagccattaaaaaagaatgaaatcatgtccttgccgcaacatggatgcaactggaggccattatcctaagcaaactaacacagaaacagaaaaccaaataccatatgttcccacttataaatgggagataaacaatgggtacacatggacttaaagatgggaacatagacactagggaatgaatgtaagtggaggcagagaaggagggaagcaagggttgaaaaactacctattgtgttctatgcttgctttctgggtaacaggttcaattgtactccaaactcaacatcatgcaatatacctttgtaacaaacctgcacatgtactcctggaatctaaaataaaataaaagttgaaaaacagaaaaaaatagactctttgaaaagatcaataaaattgataaacctctagcaaaattaacaaagaaaaaaaagagaagccacagttactaatatcaggaataaaagaggtattaatagtataactacagactccacaggcattaaaagaataatatgagaatactacgaaaaactctatacatatacatttgataacttagatgaagtagattaattccacaaaacccacaaaataccaaaattcacccaagatgaaatagataacatgaatagctatctagcaaataaatagaattcatagttaaaagccttctaaaaaattctccacccagatgtgttcattaacaaatattaccaaacatttaaagaagaaataacataaattttacaagatctcttctaaaaaatagaagatgtaatccttctcaatttattttatgaggccaagatgaaacagataacacgcatagctatctagcaaagaaatagaattaatagttaaaagccttctaaaaaattcacccagctgtgttcactagcaaatattaccaaacatttaaagaagaaataacacaaattttacataatctcttctaaaaaacagaagatgcaatccttcccaatttattttatgagaccagaattaaccagcaaccaaaccagatgaagactacaaaaacaaaaggaaaagggggaaaaaagaaaactataagagcctaaaaataaaactgcacacctacaaccatctgatctttgacaaaattagcaaaaataaacaatggggaaaggactccttgttcaataaatggtgctggagtaactggcttgctgtatgcaaaagaatgaaactgcaccccctaccttttaccatatacaaaaatcaactcaagatggattaaaattaactcaagatggattaaagatttaagtgtaagacctcaaactataaaaatcctagaagaaaacctaggaaatactgttctaaacatcagatttggcaaagaatttgtgactaagtcctcaaaagcaattgcaacaaaacaaaaattgacaagtgggacctaactggctagccgtaagcagaagattgaaactggacccccttccttacactatatacaacaaccacctcagggtgaattaaagacttaaatgtaaaaccttaaactaaaaacccttgaagaaaacctaggaaatatcattctggacataggctctagcaaagatttcatcatgaagacaccaaaagcaattgcaacaaaaacaaaatcgacgaatgggacttaattaaacttaagagcttctgcacagcaaaagaaactatcagcagagtaaagacaaaccacagaatgcgagaaaatgtttgcaaactatgcatcttacaaacgtctaatatccagaatccataaggaacttaaattgacaagcaaaaaacaaccccattaaaaagtggccaaaggacatgaacagacatttctcaaaaggagacatgcatgtggccaagaagcatatgaaaaaatgttcaacacactatcattagagaaatgcaaatcaaaaccacaatgtggctgggcgtggtggctcacgcctataatctcagcactgggaggtcaaggcgggcaggtcacttgaggtcaggagttgaagaccactctgcccaacatggcaaaaccccatctctactaaaaatacaaaaattaggtgggtgttgtggcgcacacctgtaattccagctacttgggaggctaagcaggagaatcgtttgaacccgggaggtggagtttgcagtgagttgggattgtgccactgcacttcagcctgggcaatagagtgagactctgtctcaaaacaaacaaacaaacaaaaacaaaaaaacacatacatacacaatgagataacatctcgcactagtcagaatggctatcgttaaaaagtcaaaaaaaaaaaaaaaaaaagaacagatgctcgcaaggttacagagaaaaaggaccacatatgtactgctggtgggaatgtaaattagttcagccactgtggaaagcagtttgttgatttctgaaagaagttaaagcagaagtactgttcaacccaacaattccattattgggtgtatacccaaaggaatgtgagtcattctcccataaagacatatgtatctgtatgtttatcacagcactattcacagtagcaaagacgtggaatcaacctaaatgcctattgatagtagactggattaagaaaatgtggtacatatacacaatggaatactatgtaaccataaaaaagagtaagatcatgtcctttgcagcaacatggatggagctggaagccattattctaaatgaactaacggaggaacagaaaaccaaataccacatgttctcacttatacacgggagctaaacattgagtatatgtggacagagaagggaacaacagacaccagggcctacttgagggtggagagcttaaaattaagctgtttgaactaagagttgagctaccattcaaggaaaactacctgttggatactatgctgctttttacctgggtgacaaaataatcggtcctaatttgtcacaacaaatcaccatgacatgcaatctgcctctataacaaacctgcacatgtattcctgaaactaaaataaaagttaaaacaacaacaacaacaacaacaactatagatcaatatccctctgaaacatagatgaagatgtcctcaacagagtgccagcaaattgggtaaggtcctcaaaaatggcagaacaaagacctctgaaatttctaaaagcaatgagaaaataggcaaaaataagttagaagcaactttatcaaaactctgggtattaaccaaaagttacagcattctaggaagaatttactccttaaaaatagctgaattgcagtaagaacagtaagctttgtggtattttaacttgctctgttctcacctctctccaagttcacaatagccttaaaaaccaatagcctgaaatcgtgaggaaagccaacaacctgacagtcattggagggagcaaaacaggtctggagtacatttccagagaattatgtgacctacctgggagtttcctggaagaccccactcacaaggctatctttatttgacctgactcagagctcacccagccagctgtttaacttcacagttgcctgagacaatgaatgacatttggggcaagtgagaggctagccaaaaaatgtaaagagaaaagctgaggaatgcaatgtccatagagagcttttaaagttctgacatattcctgggattttagtgggccatgcatatgtgtaggagagtgcatgtgaccagtgatgtggacatgctaagaaaagacctgaaaaggccctaagctatcaccttggtgctctgctgaagcaggaagtgaaaacaagatcagagttattacctacagtgctgaggattgaaattatgccccaatatatgcagagactcttggcaaagaatgggagacatgatggttctagacatttaaggaaatctctgtctaattattagctgactactaagttaatcgagcagtcttcaatgaccacacatgacaatacagactttacaagattattttagaaaaattacaagaacaaaaaaccttgaagagggagaataatccgatttctatatttgccacattatattatttaaaatgtactgttttcaacaaaaatcatgacacataacaaagaaagtataactaagagaaaaaaataatagaaactctccctgaggaaacccagacatttgtcttagtagacaaagctatgccttaggagagaaagctagttcaaatacattcaataactaagcaaactgtgtcaaaaactgtgagaatgatgtctcacctcactaaatagggaatatcaataaagagataaaatttgcttaacaaaaacctaatggaaattctggagttggaaagtataatagctaaaatgaaatattcattacaggggcccaacagcagatttaagaaggcagaagaaagaattgatttacttaaacatcaattgagattatttactctgaagaacagaaagaaaaagaatgaagaacaactagcataatctcagagacctgtaaaacctcatcaagcgtaccaacatatgcatatttggagtcccagaaggagaggagagaaaaaagaatagaaagaatatttaaagaaattatggctgaaaacgttccgaatttgatgaaaaacgttaatttatacatccaagaagataagcgaactccaagtaggatgaactcagggagattcctatctagatggttgaaatcaaacagccagaagacagaatctagaaagcggcaagagagaaataactcatcatatacaaaacatcctccagaccaggaagcagttaattgacatgttcaaagtgctgaaagaaaatgactgtcaaccaagaatactatatctaacaaaactgtccttcagaaataaggtaaaaattaagacattcccaaataaacaaaaaccaagagaattactctgtagcaaacttgtcctacgagaaatactaaaaggagtctttcaggctgaaatgaaaggatattaggaagtaagtcagatgcacacgatgaaataaagaatacccacaaagttaacgacatacgtaaatgtaaaagttaatataaaggtacttcttgcttataattcttttactcttgattttttaaaagagcaactgcataaaacaataattgtaaatctgtggtgattgtcttgtgggttgccaagaccaccttcaggttcagcaattcacttggaacagttagatagcctcaggatataactgtatacatggctaggatttattacagtgaaacgacaccaagcacagtcagcaaagagaacaaaacatgtgcatgggacaaagtctagggagccagtcttaagcttccaagtgtcctctcccagtgcagttacacaggacacacttccccgagcaatgagttgtggcaacatgtgtcaaatatttccaatcagaggaactcattagcacccagggattttactggggctggtcatataggcagcctctgcctagcagtttccagaagactagactctcaaaaggagaatgagtattcagcattaatatattgtttactcaaacagttcaggcacagtgagacactcttatcagtcaatcacaggtaccctcctgaatctaagttttcattcatcagcccaggaacacctttaaacagacctttctaggggtaaacaatccaacctacaatgttaattcttctgcaccagcatacaatgtttaaagatataatttatatgacaataacaacccaaaggtgacagatgagggaacagaaggaccatttttttgtactattgaaattaagttggcaattttcctgactagtttattactggttgatatgtttattatactcttcaaccactaataaaaataagaaaatatagtaatgtaaatgacaagagaattaaaattatatactggaaagtgtctattggagaaaatggaaagtaatggaaagacagaagaacaaaatacgtaaggcatatagaaagcaaatagcaaagtgagtattttacaaaatagctgagtaaatcctaccttatcagtaattacattaaatgtaaatggattaaatactccaatctaaaggcaaagtttggctgaatggattgaaaacaatgtgatatatgctgtctgcaagagaaacactagtttaaaaaacacaaataggttgaaaataaaatgatgggaaaagacataccatgcaaatagtaaacaaaagagagctggtttggttatactaatatcagataaaatagacccttaagacaaaaaaaagttaatagaaacaattaacattttataatgataaaagtgccattctgcctgcaatcccagcactttgggaggctgaggtgggcagatcgcttgagcttaggagttcaagactagcctaggtaacatgatgaaaccctgtctctactaaaagtacaaaaaaattagccaggtgtagtggcatgtgcctataatcccagctattcaggagactgatgtgggagaatcacctgagcccaggaagttgaggctgcagtaagccatgacctcactacttcactccagcctgggcaactggagtaagaccctgtctcaaaaaaaaataaaaataaaaaataaaaaaaaataacaagtctaaatatgcaattataaacatacaaagttaacaaaaaggccccaaaacacatctagcaaaaagcatcagaaatcaataatttagtaatacttggagacttccataccctgctcaataatgggtagaacaactagaaggaaaatcaacagaaaataaaagccttgaacaaaactacaaaccaacaactacaaacaaacctaacagacatctgtagcacacttcacccaacaacaggaaaatacgcattctgctcaagtgaacatggcatgttcttcaggataggccatccgttcatccataaaatataaggttccataaatgttaagaggttgaaatcattacaagtattatttctgactacaatgaaataaaccagaaatcaataatgggaggaaaaatggaaaactcacaaatacatggaaattcaatgatatacttttaaacaaccagtgggtcaaagaagaaatcagaagaaaaattgaaaaatacattgtgataaatgaaaatggaaacaatgtcccaaaattttggggacacagtgaaagtactactcccagggaaacttaaaaaagctgtaaacatctaggccaggcacggtggctcacgtgtgtaatcctagcactttgggaggccaacacgggcagattacctgaggtcaggagttcgagaccagcctggccaacatggtgaaaccccgtctctactaaaaatacaaaaattagccaggtgtggtagtacatgcctgtaatcccagctacttgggaggctgaggcaggagaactgcttgagcccagggggcggaggtttcagtgagctgagatcatgccactgcactccatcctggctgacagagcgagactctgtctaaaaaaaaaaaatactgtaaacatctgtattttaaaagaataaacatctggaatcaataatctaaccttcctccttaaggaattaggaaaaaaaaaagagcaaactaaacccaaagcgaggcaattaaaggaaatactagaaatgaaaaaggaaataaatgaaatagagaattcaaagaacagtagagaataaccaaggtaacaaaagttgatttgttgaaaagatcaacaaaattgacagacctgtaccaagactgaccaaagaaaatacagagaagttctaattcactaaaattagaaatgaaagaggggatgttactaccttacagaaatacaaaggattataagagaataccttcaaaaattgtgtgatgacaaataacttagattaaatggacaaattcatagatagacacaaaatactgagaatatatcaagaagaaatagaatatctttttttttttttttttttttttttttttttttttgagacagagtctcacactgttgcctgggctggagtgcaatggcatgatctcggctcactgcaacctctgcctcccaggttcaagcaattctcctgtctcagcctcctgagtagctaggattacaggtgcctgccaccatgcccggctgcatttttagaagagacggggtttcactatgttggccaggctgatcttgaactcctgacctcgtgatccacctcccaaactgctgggattacaggtgtgagccactgcgaccagctgaaatagaatatctgaatagatgtataacaagtaaagatagaatttgtcatcaaaacacttcccccccccttttttttttttttttttgagacagagtctctatctgttgcccaggctggagtacagcggcgcaatctcagcttactgcaagctccacctcccaggttcacgccattctcctgcctcagcctcccgagtagctggggactacaggtgcccgccaccacacccggctaattttttgtatatttagtagagacagggtttcaccgtgttagccaggatggtatcgatctcctgatctcgtgatctgcccaccttggcctcccaaagtgctgggattacaggcatgagccaccacgcctggcctttttttttttttttttgtgagacaaagtctcactctgtcactcaggctggaatgcagtggcgtgatctcagctcactgcaacctctacctcccaggttcaagtgattcttctgcctcagcctcatgatcaaatggcttcactggtgaattctaccaaaaatttacagaagaatttgcattaatctttcattaactctagcaaaaaatgggagagaaatatttaccaactcattctatgtggccagtattacctgatactaaaacaagtaaaatacattacgagaaaagaagattgtacagcaatatttcatatgactatagaaataaaagccattgacagaatcagcaacatactaaaaggattatacaccatgaccaagtaagattgatcccagcaatccaagactggttcaacatgctttataaaatcaattaatgtaatacaccatattaaaagaagactaaaaccacacgatcttctcaagatgcaaaaaaaaaaaaaaagcataaaacagtattcaacacattttcatgatgaaaatactcaacaaagtgggaatataaggttacttacttagctttaatgaggtcatctattaaaagctcacagctaacatcatacttaatcttaaaagactgaaatgtttttcctaagttcaagatcacgacagtgattttcactcttaccacttctattcaatattgtattggaggttctaaccagggcagtgagacaagaagaagaaagaaaggtatacagattggaaaggaggaagcagaactatttttatttgcaaatgatatattacattctaagaaaattctaagaaatccatttttaaaataacagaactgataggttcagcaaggtttcaggttacaagaccaatattaaaaaatcaatgacatttttattcactagcagccaaaaatctaaaaatgaacttaaaaaataccatttaaaataacatcagaaagaagaaaatacttagaaatatacttaactaaggagatgaaagatctgtatactgaaaactgcaagacattattgaaagaaaattctaaataaatggaaagaatcccacgttcatggattagaagacttatcattaggatatcaacactcccctatattgatatagaggttaaatacaatactaatcaaaatcccagctgactttctggcaggaattgagaagctgattctaaaattattatggaaaagcaaggaacccagaatagtcaaaacaatcttgaaaaagaagaacatactaggagaacaaacagttttctatttcaaacttactacaaagctacaataatcaagactatgttgtactggcataaagacagatgtatagatcaatgggtagaattgagggtccataaacaaattcatacatctacagtgaactggtttttgacaagagtgccaagacaactcaaagaaagaatagtcttttcaacagatggtgttgggacaactggatatctgtgcaaataatgaaattagactcctacctcacaccatatacaaaagttaactcaaagtggatcaaagacagaaaaaggcaaaaacagaggtataaattttcttgaccttgtattaggcaatagtttcttagatctgctatcagaagcacaagcaaccaaagaaaaagcagataaattggactttgttacagttcaaatttttattcttcaaaggacagtatcaagaaatggaaaagacaactcacatatggagaaaatatttgtaaatcatgtgtagcaggatctagtatccagaatatataaagaactcttacaacttaataataaaaagacaaaatgggccattaaaaatggaccaataatttgaacagacttctccaaaaaaggatacacaaatggccagtaagcacgtaaaaaatgatgttcaacatcattggttgttagggaaatgcaaatcaaagccataatgaaatattatttcacactttctagggtagatatatttttagaagggtatacaataacaaatgatggtgaggatgtggagattttggaacccttgtacgtaggtggtgggaatgtaaaatgtgcagctgctttggaaaacagtatggcagtgtttgaaaaagttaaacatagaattactatatgactccccaattccacttctaggtgtatgcccaagagaataaaaaacatgtattcatataaaaacttgtacccaaatgtttaatagcagcattattcatactagccaaaaagtggaaacattaacttataaatgaagtactgagaaatgatacaatatgagtgaatcttgaaaacatcatgttcagtgaaatatgccagatacaaaatgctacatattgtctgattcccgttaaatgaaatgtccagaattggcaactctctaaggacagaaagattagtggttgccagaggtaatggggaataattgggataatttggagtaacaattagtgggcacagggtttctttttggggtggtgaaaatgttctgggatagataagtggtataggttatacagccttgtaaatataccacaaaccattgcattgtgcactttaaaattgtttaataattattaaaaagtatgtttttatttttaatgtgtttttttaaactagcaaattgaatccaacaatctataaaaagaataatacaccatgactaggaatgcaaggatgattcagtgtttgaaaatgaaccagtgtaatctaccatattaacagtcaaaagaagaaaaactacatgttatgtcaattgaattttagaatatttttgacaaaattaaatgtttattcatgatttaaaactctcatcaaactagtaaaaaggacctttacaattatttataatacttaaggtaaaaaaaagaaaacagtctatgtggctaagaaagatcttagaatatattttctataattttcttgagtgcaaaataaaatacaacattttggatgcaagttatctgtatttggaaaaagtagggaatttttaatacatctagtttgttacattgtgttggatagcttctgtaacttttctgataataacaaattgtttaaaggaatctataaaattgatttttttccaattttctgtctgtcccactggaaaactggatttatttccgatgttataattatttgactttttccctattttttctagatgtattagacacagaaatgattggggagctcttattctagtggatgatcgctttaggaataacccaagtcgctatatatctggtaagatctcagctgggcttagagtaaaaactagtaacaatcttcatatttttattgtggtgaaaaacacataacatgagctctactatcttattaagtgcacagtacaatattgttaactataagcacagtatttcacagcagatatctagaacttttaaatcttacataactgaaacttaacaccaactgaacagcaatgccccatgtccctctcccccctgtccactgacaaccaccgctatactttctgcttctattagtttgactgttttggatacctcatataaattgaattatgcagtatttgtccttctgtaactggcttatttcagttagcataatgtcctcaaggttcatctatgttgcaggatttccttcttttcaatgactgcttaatattttattttatgtatacattataccatattttctttatccattcatctgtcagtagacatttaggttgtttccccctcatggatattgggaacaatgctgcaatggacatgggaatgcagatatctcttcaagatgctgatttcaatttttttgaacaaataccaagcgtaggatttggcgaatcatcatagttctaagtttaattttttgatttgatactgttcttcatagcaactgcaccatttaacattcccaccaatagcacacaagggttccagtttctccatatcctccctaatgcttatttccttttttcttctttttctttttaaaatttcataatggctctcctagcaggtataatgtgatagcacagtgtggatttgatttgcatttctctgatgaatagggatgttaagcatcttttctatacctgttggccaaatcatatgtcttctttggagaaacatcttttcatttgctcattttttaattgggttatttggatttctttgcatatctgtttttttggtttggtttttggtgtgtttttttgtttgttttttctattgagatataggagtttcttatatattttggggattaactctttatcagatatatgcgttgcaaattattttctcccattctataggctgccttttgactctgctgattatttactttgctgcacagaagttttttagtttaacatggtcttccttgtctaattttgcttttattgcctgtgtttttggtgtcatatccaaacaatcattgccaataccaagactggataatttataaagataagagatttatttggcttatggttctgcaggctgcacaagaatcatggcatcagcatctgcttctaatgaggacctcagaaagtctacaatcatagcaccaaggctttcatgagggttctgtccccatgacccacatacctcccactaggccccacctatgacatgggggaacacatttcaacatgagctttggaggaaacaaataaccaaagcatatcaatccccaatgacaccctgttgaagatccgctgaccatatatgtgtggatctgcttctgagctctctattatgttccattggcttatatggttctctttatgccagtaccatacttttttgactactacagctgtgtaatgtattttataatcgggaggtatgatgcctgcagcttttatcatttttctcaaggttcttttgcctatttgtggtcctttgtggttccatatgaatttagattgcagccgggcatggtggctcacgcctgtaatcccagtgttttgggaggccaaggcaggtggatcacgaggtcaggagtttgagaccagcctggccaacatggtgaaaccccatctctattaaaaatacaaaaattagccgggtgcggtggcgggtgcctgtaatctcaactattctggaggctgaggcaggagaatggcttgaacctgggaggcggaggttgcagtgagccaagaccgcgccactgcactctagcctgggcaacagagcaagattctgtctcaaaaaaagattgctttcagtagtatggacattctgacaatattaggtgttccaatctgtgaacatgggatatctttccatttatttgtgttatctttactgtttttcagcaatgttttataatttccagtgtacaggttttttgcctccttagttgtttattcctaggtattttattatttttgatgctattttttttccctggtttgagtttttttattttaatttttatttttattattatactttaagttctagggtacatgtgcacaacgtgcaggtttgttacatatgtatacatgtcccatgttagtgtgctgcacccattaacttgtcgtttacattaggtatatctcctaatgctatccctcccccctctccccccaccccacaacaggccccggtgtgtgatgtcccccttcctgtgtccaagtgttctcattgttcagttctcacctatgagtgagaacatgccatgtttggttttctgtccttgcggtagtgtgctgagaatgatggtttccagcttcattcatactattataaatgggattgttttcttacattcctcttttggttgtttttagtgtatagaattgcaagtgattgttgtacattgatttttgtattctgcaactttactggatttattagtcctaacaggttttttttcaatctttagggttttccacataaaagatcatgtcatctgcaaagagagatcatttcactttattctttttcaatttggattccttttatttcattttcttgcctaatagtctggctaggattcttagtactaagctaaatagaagtagtgagaatgaacatccttgctttgttgctggtcttaaaagcttttcattttttaattttttgaagaaaaatgctttgattcctttctcatttttcttttgtataccttctatagatatttcctttgtggttacatgggtcttacatgaaacatagttataacaatattttcagctaacaaattcatttcagttgtataaactctacacttttacttttcccatcacattttattattaaagtcacaaattatacccttttatatagtgtatccactaacatactattatagttattttcatactttgtcttttaacttctgtatagaattaaacattatttatgtatcactgttgttatattaaagtattctgtatttgtgtacacttttaacttcacgagcaaactttatgcttttgtgttgctgtttagcaggcttcctttagcatatcttgtaaggcacgtttagtggtgaagtccctcagcttttgcttatctggaaaagtttttacctcctattcattttgatagatggctttaccagatataatatccttcactggcaggtttttttctttcagcacttcaaacatgtcatcccacttccttacagcatgcaagatgtcgcctgagaaatctttctctttttggagacaggatgttactctgccacccaggcaggagtccagtggcatgatcatgactcactgcagcctcagcctcccaggctcaagtgatcctcccacctcagcctcagctgggactacaggcatgcaccaccagacctggctaatttttaattttttttgtagagatggggtctcactatgttgcccaggctaatctcaaactcctcggctcaagcaattctcctacctctgcctcccaaagtgttgggattataggcatgagccttcatgcccggcctagtgactgtcttatgggacttcatttgtatatgacaagttgcttttatcttgctgttttcaaatttctattgttttctttgacttttgacactttgattataaagtgttttggtacagacttttgggttcatcctgttcaggttcactgggcttcatgtatttggatgtcattttcctccccccaggtttattaagttttcggtcattatttctataaataagctttctgctcctttctctctttctctttctaggactcccagaatgtgtatattggtcagcttgacggtgccccataagtcaagtcataaatgaagccataagccttcacttttttttttccattttgttttttactttttgcttccctgactggatgatttcaaacgacttgccttcaaatttcctgattcttagcactttgggaggctgaggaaggtggatcacttgaggtcaggagttcaagaccagcctggccaacgtggtgaaaccccacctctactaaaaatacgacaattagccgggtgtggtggtacatgcctgtagtcccagctacttgagaggccgaggcaggagaatcgcttgaatcagggaggcggaggtttcagtgagccgagatggcgccactgcactccagcctgggcgacagagcgagactgtctcaaaaaaataacataacataacataacataacataacagaatataaaatatataaaataaagtaaaataaaataaatttcctgattcttccttctgcttgatcaagtctgctgatgaacccctgtagtgaatttttcagtccagttattgcattttttagctccaaaatctctttagttcttttttgtattctttatcattgttgaaattctcctttttttctatattattttcttgaacttgtgagcatcatgttgacagttattttaaattccttgccaggtaattcatatagcttttttttttttttaagggttggtttctggagacttattttgttcctttgacagggttattttttcctgtttctttatgtttcttgtaaccttgtatggtatccacacatttgaaaaaacagccacctctcacagtgtttactaactggttttgtacagggaaagaccttcactcatcagccctggtaggcattctgggagcctctcaaaccttttccgtggatctgtcttctttggacttctctgtaaattccttattagaaatatttgcttggtttttttttgttttggtcaaggtctcactctgtcgcccatgttggagtgcagtggtacaatctcagctcattgcagcctcggcttcctgggttcaagggattctcccacctcagtctcccaagtaactgggaccacaggtgtacaccactatacccagttaattcttgtattttttgtagagatggggtttcaccatgttgtccacgctggtctcaaactcctgggctctgggctcaagtcatctgcctgcctcggcctccctaagtgctgggattacaggcatgagccatcacgcctgactctcttttgttcttagtagattccaggcatacagagtatgctaggtccagtcagtactctatgacaagcaagacagaaacgagtccctagacagctccttgaaaagccaagatgttggatgcacactccaggcttttctgtccccctgagggagtggccatcaaactatatgggcctctgttgcactgtggttcctgtggagcagaaacttgctgcacagcgcttttgttcttagtggcccctgggcatgtagggtatgccagctcatgtcagctcttcagtacaggtaagatagaagccagtccctggggcagcctcccagaaaaagacataaggtccagttttctcttttctccccaggaagaagcagccaggtatattctgaagtggggatcatgacaagagggtgccacaaattttcctaccgctttgatgcaggcagtagtatcatttttttctcactcgatggtttcatccaacagtaaacagttttcagagtcaataccaggagtgattactaaagagctatgggatacatgtgtatctttattattaccttttagctaaaaaaaaaatacattttattataataaagagatgttaaattttgttttagattagccatgtgtgggtgtagactctaccttttcaatttcagagcttaatgactgtatttggtttgatattaaaacataaagcagaaaatattgctttatttgttttatcttccctttccacgtaaagtgtgcagtagcataggtcaaacagtaactaaaggcaaaaatgctaagtgctggtgtctagtcagcaggtggagctcagattctttcaagttttcaaaagcagacaatgatattttacattgaaaaggctttctttgattataaaaaggttgaaatgaagaggtaaatatagtactaaaattcttatttttatttacttatttcttttttagagacaggtcttactctgttgcccaggctggagtgcagtgacgtgatcatagttcactgaaaccttgaactcctggcctcaagcaatcttcccacctcagcctccccaaatgctgggattatacatgtgagccaccacactcagcctaaaaattttcaattttagagaatttcacatatttttatggtctaatcatattccccaaatgaacaaaataaaaaacttcaagggaaatggcttatttaaaatttttttagttttaaaatctagaacttaaatttttaccctatagtgacttttaaaactaattcctccaaaagatgatgctagttttagtagtgttagcagggaatatttattttgtaaaagtccaaatacctgattttgcatttcatttggaagcacaccatactagaaaacaccttaaactcttaggtttcatttttgtgcagtttttatgtcacaggtcaaatcatatcctttataacttgattatatattaaaaataattatatcataaaaattcagaagggatgtgatttacccataagacagtgttatttatttcacctccagaataattttaatttaagatatatttggaattggtggaggaagggaacaaaaaaacttgagactagaatcttgaaattatttttgcaaaaggagtaaaatttagaatattagaatggaaagttgtattgtttacaacttctagtttccctacaaaaaaaaaaggcaatttttgtggggaattatgatgaaattaaatttgccatgttcaccagttattcttaaccagagaatatgttttcccatctctgccctacttctactgcctctttgctctctccatttgacaattactgtatataaagagaatgttactcatatgttactgatacatatgtagtaaaattgctgaattgcagaaaaaacatatggagaaccattctgtatattcaaaatacaaattaggttacttcactagaaaaagcaagtgtattaccttagcatgtaatattttaataactaagtaaccaaattttccctgggtttacctttttctttaggactttctaaatgggtacggcagcagattcagcaccattcaacctttgaaagtgcactggaatccttggctgaattttccaaaaagcatcaaaaagttcttaatgtatccataaaggacagaaccaatatacaggacaatgagtctacacttgaagtgacctctttaaagtacagtacctcaccttatttactggaagcagcaagtcatctatcaccagaaaattttgtggaagatgaagcaaagatatgtgtccaggaactacagtgtcctaaaattattaccaaaaattcacctctaccaagtagcattatctccagaaaggagaaaagtatgaaaagttcttcccatttacctttgatagagaagtctttcattatatttagtgaaatgatatttatttgggtatagattaattccttaaatatggtggtttgtaatataaggtgttatcataaaatagtgaaacagtatggtgtactgtaatgggaacaaacttttgtcaggagaccagagcatattttctggttttccactaactggctttgccacttactagctttgtgatcatgagcaagtcatttgtcctttttgagtcgtaataggaaaaaaaaaatgcctgcctagctatcccttcaggttgggttgtaaaggtcaaaattataaatatcacagcattgtaaagtaccatgtaagtggtagatgttattctaaaggctatataaaaatttggcctaatttttatgtagatacttctatatgaactacttttcctatatagatagttcttatgaacttatttttaggaggtgagagacatttattttaagtgatgaaaaataatattttaaaatattttgaaataatcatctgtatcagattggcaaactgtggcccatgggccaaatttggcctgctgcctgtttttgtaaataaagtttaatgaaatgtagtcatgcccatttatttacattttagaaacaacagcagagttgagtatttgtgtgtattgcactagaacagcataattgagtagtcgcaacagatacattatgctccacaaagcctaaatattactatctggcctatgacagaaaaggtttgccaaactctggtctattccattggatataatttcagttgttttaattcatatatccaaggcgggtggatcatccgaggtcaggagtccgagaccagcctgaccagtgtggtgaaacaccgtctctactaaaaaaatacaaaaattagctgggtgtggaggcagctgtctgtaatcccagctactcaggaggctgaggcaggagaattgcttgaactgggaggtggaggttgcagtgagccaggattgcgccattgcactccagcctgggcaacaaaagcaaaactcggactaaaaaaaagaaaaacatcaatttttaaacatgtattttgtagtatataagtactacaaaatagtaatacaattttgtatataaatactacaaaatagtaatacaaaattcactataaatagtgaattcaagccgattaacttggtaatcaggaaacctagtttctagtcttggtcttcttactaaccagttttataactttgagcaaataacttagccttatgtcactttccttatttattaaataaaagaattagtctaggtaagtttttctcagtcactggttagtggattttcaaggcaaatgtttacagcctgttccctcctttcctcagctcccttcctcttcccttttaccccttctttcctcattcattcttgagctccctgctgtggaatttgatagtttaccagacagcattataacttgggctaggaaacattagagacctaagatttctttcagagttaatattctgttccaagatgaaaatccactagtattcgttgggggctctaagttatgtatcctatacagttatttaggtatttctaataaataattattttaacctagcaattatgttagctaggagcagaaagttaaatctcttaaattcttgtattcttagatgatccagtattcctggaagaagcagggaaagcagaaaaaattgtgatttccagatccacaagcccaactttcaacaaacaaacaaagagagttagctggtcaagctttaattctttgggacagtattttactggtaaaataccgaaggcaacacctgagctcgggtcatcagagaatagtgcctctagtcctccccgtttcaaaacagagaagatggaaagtaaaactgttttgcccttcactgataaatgtgaatcctcaaatctgacagtaaacacatcgtttggatcatgccctcaatcagaaaccattatttcatcattaaagattgatgccacccttactagaaaaaatcattctgaacatccgctctgttctgaagaagccctggatccagacattgaattgtctctagtaagtgaagaagataaacagtccacttcaaatagagattttgaaacagaagcagaagatgaatctatctattttacacctgaactttatgatcctgaagatacagatgaagaaaaaaatgacctagctgaaactgatagaggaaatagattggctaacaattcagattgcattttagctaaagacctttttgaaattagaactataaaagaagtagattcagccagagaagtgaaagctgaggattgcatagatacaaagttgaatggaattctgcatattgaagaaagtaaaattgatgacattgatggtaatgtaaaaacaacttggataaatgaactggaactgggaaaaactcatgaaatagaaataaagaactttaaaccatctccttccaaaaataaaggcatgtttcctggttttaagtaataatacttaactctcaagctaagtaaaaatatgtcatcatgcttatgttaaactctgttgtaagtaataatttgtaaattgaataagtggcatactttttaaaaaactattttatgttcagaaatgtaaatgttattattcttgagtttttgggtttttttttttgagacagagtcttggtctgttgcccaggctggaatgcagtggtgtgctctgggctcactgcaaccttcacctccaggttcaagtgattctcctgcctcagccttctgagtagctgggactacaggtgtgcaccaccatgcccagctagtttttgtatttttagtagagatggggtttcaccatgttggccaggctggtctcgaactcctggcctcgtgatctgcccttctctgcctccctaagttgctgggattacaggtgtgagccacagtgcctggcccattcttgagttttgataaagtaattcatacaaagtactgtcctcaaataagtcttccttagctaaatgcaatttaaaattattcaaagatcctagggcacttctagtttcacgtaaatattcatattaggtggttctcttcatccatttgttttcacactgatacataaaaattaacagcagtctaatctagtgacacctcagtcatatttcgctatagattttacctcaaatcagtccaagactttttcagagatcaccatttgtcttgaaaggtttatttcgttattaaactgcctacttataagtaattaagagaaattaagaaagtagtatgcatttttaattgaaattgttttacattctttgtataataaacctaaaaccaaacatgtcataaacaaattgacgtaaagatataaaatgccaaatgaagtattccaaattttctattctaattatttagcttcaccatcattgtggaaaaaaatactagatcctgcttagtattatatatttttcctagtggatcagtgagtaataagtaccaaacactagactagaaggtaatttctacattgtttagaaagggtgaaacaatttatcccctctggtattgttctagcataagctttagttatacaatgattaagatagaaaacttcatatataaatttgataagcaaacccacatttatagctgcagctaaaatatgtttccttagggcacagtaatcctttctgtgaattttgaccttgtttgtgtttttgtgaatgaagctatatgtctaatcaaaaatgattataaaagaggctcatctctgacatcattccaaaaatacattcattgatctctttttaagaaacatctgttattcactgggcattgggactttttgtgagtaatttgaattgaaattttatgagctatccaagaattctgtatggtctattattttcaagtcaaaatttccagtaaggatttactttacatttcatttggataaatgaatcattatataggtatgtctttgcttccattttgagacatttagatttttacagcctgtttctatagcatttgatgttacaactctaagcgtagttcaaagacatttaaattgacaagttaccagttaaagaatttagaatatattagatcccatctagtattatatattttttctagttgatcattgagcagtaaataccaaatactcgattagaaggtaatttttacattgttttgaaagggtgaaacaatttatctcctctggtattattcttaaaccacagatagggatagtagggtagtgaaacgaataaatacctggtagaagacaagagacttgggctctacacctggctctgccactgatttgctaagtcatattggcaatcaccacacccttcagggaattagtttcatctgtaaaatgcagcggttagtactataaaatcatacaaatttctttgtgctttgagaatctataaaggaatgtctgttgatattctgagtcgattttcatttgcttttgttccagaacggttaaaataaagcatattatttcatttaaaaagtaaagtggctcttactcatttacatttagggaacgatggtgacgtggtttggctatgtccccagccagatctcatcttgaattgtagttcccataatcccgacgtgttgtgggaaggacccagtgggaggtaattgaatcgtgggggcggttaccctcatgcggttctcgtgatactgagttcttatgagacctgatgattttataaggagcttttccctgcttcactctcattcttctctcctgctgccctgtgaaaagttgccttccgccatgattgtaagtttcttgaggcctcctcagtcatgcagaactgtgagtcaattaaacctctttcctttataaattacccagtcttgggtatgactttattagcagcatgagaacagactgacacagatggtatatgtgcataataacttggaaagctagatatttattttcgcaatgctacaattaaaacattttgaggacttttaaaattacctttagggccaggcgcggtggctcacgcctgtaatcccagcactttgggaggccgaggcgggcggatcacgaggtcaggagatcgagaccatcctggttaacacggtgaaaccccgtctctactaaaaatacaaaaaattagccaggcgtggtggcgggcgcctgtagtcccagctactcaggaggctgaggcaggagaatggcgtgaacccgggaggtggagcttgcagtgagccgagattgcgccactgcactccagcctgggcgacagagcgggactccgtctcaaaaaaaaaaaaaaaaagaaattacctttagaattggtaaactacatgagaaaattaagcatattattcatatcttagtgttattacccaacttcatctccaatactttcccctttccctagctagatatgtttttgtttgtttgttttagacagtcttgctctgtcgctcaggctggagtgcaaaggcacgatcttggctcactgcaacctctgcctcgcaggttaaagcgattctcatgtctcagcctcctgcgtagctgggattacaggtgtacaccactgcacccagctaatttttttttttttttttttttaagtatcgacagggtttcaccatgttggccaggctggtctcaaactcctgacctcaagtgatctgcccacctcggcctcccaaagtgttgggattacaggcgtgagccaccatgcctggcctagatattttttattctttccaaaatttaattctccctgaagttaaaaattttcattactgagaatgtacatagagatgtgtcacaaccctttagtaattccaaaaggtgtttcaaaaattttatacaatgataatcactgttgaaacaggtgtatattctcctcagatcatgactgaccaagatgatattccaagaagtaaactactggcctttatagagtaggatgtaggccattttcattactgataacatacttttaaaagaaatgtttacagatttaaataagttaaaacatctaaatgcttttaaaagagcacctggcacattgcaagttattcattattaattagtagatgaatcatatatctggagtgcacccttgctctatatgaaagcttccctaactatagatatataggtgatagactgacaataaagatttgaggaaagaaaaattatttggctggcttattttttaagcttttgagatgtataaggtagagattgtttatcaaataatttatgtgacacattcaatgcatatgaaataattatctaatactgaatttattcaaggactgaaagtatatagagcacacaggctgcaaaccaggaaaactaccagttagagacagggctttattcttggaataaaggtacaatgtaaagagtagatgtttcatgacttgattaaattatttaaaactgtctagaattgtgttataaaactattactatgtttctatgcacttagttattacatgggtttaaatttggcactgtttctaagtttctataaggctttgttgttaagatctttctattcaaaacattaattttaacaaaaagcttttccccgttatttttctgcaactggacttttttgtattactttcctatattaaaacgcatttaaaata

SEQ ID NO: 8 - DNA, 93073 bp, Homo sapiens
  source 1..93073: mol_type = genomic DNA; note = CEP290_gene
attctggccttggcggagttggggatggtgtcgcctagcagccgctgccgctttggcttgctcgggaccatttggctggacccagagtccgcgtggaaccgcgatagggatctgtcagggcccgcggccgggtccagcttggtggttgcggtagtgagaggcctccgctggttgccaggcttggtctaggtgggtggatccttgtaagcaggattagcgagtcactccacgctcaggttctttagcctgagggcccgtgtgccacagcatagctaccccgcccttccagcctcgggtccctaatactgccttgcttcggttccagtttccgccgcacaacttcactcattccaaatgttaatttctgcgttttttttcagccccaattctgtttctccaaatcagggatgattgtcggccttccacagaccctcgcgcttgccaggattagggtgttcgcgcgcattgtgggtaggggtgtggaggaagggatccagaaatcttaagtattaacttagattagtgttagcaaggaagccgtcacattttatttagccgggacactctgacagtttgtgccgactgctatttttgatcaaggctattttgcccacttgtctattttgtggcccaattgtctgttttgctaacatcagaaagttataatgaaataatctgcaaaaaatgtaaggtgctagaaaaccaataatactgtgtaccttgaaaatgctaatatacacctgttttgttacagaggtggagcacagtgaaagaattcaagatgccacctaatataaactggaaagaaataatgaaagttgacccagatgacctgccccgtcaagaagaactggcagataatttattgatttccttatccaaggtgcttaattggtcaataataatagatatatacattaacttatgattaatttattaataaaatatgaatttatttttttcagggacaactataattgtcacaatctggaagtgttcttatattttgcttgaaggttataaaatataaaacagttgcttttctgtttacttaggtggaagtaaatgagctaaaaagtgaaaagcaagaaaatgtgatacaccttttcagaattactcagtcactaatgaaggtttgtatgtagtaggttttaactataggtttggctattagtggaactataaaaatctgttcttatataaggtaatctttgtgaaaatacctggtaatatctacatcaccactaaaaaatgcaatatatttaaatgtgaattaagtattttagtgtataaaacattgctagtttctacttaaagtttctaaaagggtgtgtaggggaaatagaatgagtatgttgaaaagtaacataaggaaatatatcttgaggtccaaatgacaaatgcagacaatgactgctatagggatttgttaagaggggaaatgatttaagagatgtcagaagacttcacaaaggatcaatactgaggagtagtgttagataagtggaaggcaatgcagtggtaagatagtaagggaattctagagctgttggttaccataaataaatactgagaacaggaaatatgtttattctttatatttgaggaaacaaggtgcagcaagtttgtagcagactgtagagaaaacaaatcttgggtaagtactttgagataggttgttgagggccttaaaggtgtattttatgctatcagcaattgagaaggcagtaaaggttttcgaaacacaattgataggtacaaaaatacaccttaagaaggcaaaactgagtatattatgtaggacaaactgaaggaaattggagctttgtagacatcacattatagcggagtttaaacctgaaattatggattagaataatagcaattggaacagaaaaaaagtagtggaaagacattacaaagggagatgttgcattactggatataagacttgaggacttgaggtaaaaaggagaatcaaaaatgtttcatgctattaaaaatctagaaattgtagtcttaagtaagaaaattgcctggcatggtggctcacgtctgtaatcccagcactttgggaggccaaggcaggaggattgcttgagcctgggagttcaagactagcctggataatatagtgagtccttgcctgtacgaaaaaatttgccgagcatgatggcacaccaagcatgatggcacgccaagcatgatggcatgcacctgtagtcccagctactcaggagactgagatgggaagattgcttgagcccaggaggcaggaggttgcagtgagctgagattgtgccactgcactccagcctgggtgacaaagtgaggccctatctcaaaagcaaaaaaaacaaaaacaaaaaccaaaaactatttattcagcaaatatttactgaacgtctccatgtgccagccattgctggcactaaggatcataacaaataaaacagaatttttattttcagtgcttacattccagtataaaggcatattgaaataacctttttttaatgtttagatgaaagctcaagaagtggagctggctttggaagaagtagaaaaagctggagaagaacaagcaaaatttggtaagcaccttggaaaaagtttattatggtattaaataatgaattccatttgttcattaaactgtagaaaattaaattatattctataaaatatatatattcagtttatttttaatatataacatttaataataaatatttctagactcctattttatggatctgccatataatactttttgttaccttataatcatgatggactcttttaaaagaattaattttgttattgaaatttatttaaaagtttgttttgtggtaactaatcaattaaaacgtttttctttttttttaaaaaaatagaaaatcaattaaaaactaaagtaatgaaactggaaaatgaactggaggtatgtctttttgtattccctaggatgtaattgtcattaattttattttgaattgttttcaaattttaaaattattgttggctggaaaaattataaggatgattgtaatcatggttatttgtttattctgtatatgttctacatgcctattatgtgccttatatagtactaaggactgagcatatggttgtgaacaaaataagaagttaactgctggatggagcttatagtcttgggaaatatacagaaagattactagtaactgaggtggagggtgggtggggatttgaggaatagtgacgaaagggtgttatagaagtaatttttgacaaagctgaaggctaaaatatgaatgtattgttgaagaacaaaatacattgagattcctgagaaggtaggaatgtgatacaaatggatcagcctttgaaaggaggaatacccttttcctttgtgttaggagaggaggatgagtggatgagcgtgggaagagtggatgtgtatagaggcttttatgtttgtaggcataatgcttggaagttgaggggttggtgatgacatcttctgttaaaaagagtgggaaatggtgtggtcacattttaaggaaattaggtaaaatttgaaatatattggagacaggactggagagttggggatctggagtcagacagatttgagttctagtcctgattcttctactcgttaactctctgaacttggatgacctattgtttttgattgtatatccagctcctgggaaaatgccaagcactttcaataaatactaaatgaattatggagttggatcagttctgtgttagtgtttagctaggtagctgctgtagaatagaagggtagcacagttgaagatattggtaggaaagtggttgaagtgatgattatgaagtcttaactgaatagataaaatcaagattggggttgggtgggcagaagggtagggatatggagggagaagatgaggggttagagtgtcctgtgaggtcgaaggacaggcatagtgggaataattgaaagaatgttctggttggacaaggatctgatgtgggtgtgggagtgagagactatagtgaattcaagaaaaaaatagactagaacaaaagttatgtggagattgcttagtgggcatttgatagacatctgtgggccacatgcttaaattcccagtgcattttgcggagttactggaaggttggtggcttgtttctaccatgagtaggtaaagatggagagcaggatattttgtgagaaagcagctgaagtttctataggatgatggaggaatgataggaatgatcacctgaagttgcagggtggggtaaacctagaagcaccaacaccttcttctgaccctcatgtatttggaatctgaaagaatgagcaccttccaattgaaagagttccaagggcattagtatactaaaggatccaaattgcagctaagccaaggagatggaaaggaggattcagtaaagaatctgaggatgtgaaatattaatttatcttggaagagaattttagagagcacaatggaatgctttttggaggagagaaagagtaagaacaatttggttaaggtagaggaataacagaactataaggtgaagaaatgaatgtgagacacattagatgaccaaatgatttgatgttcttggccatgacctgaattaacaagactgtgaggtaaaatggatttaatcggctacaaatcttaagataaccaaaacctgagctgtttaatatggtagcactagcactaaccacttgtagctatttatatttacattggttaaaattaaaatgaaaaatttagttcttcagttgcactagccacacttcaaatgcccgaacatagctacatgtagcgagtggctattgaactggacagcactgacagcatgtccattatgctagaaagtcctatgggacagcactggtctaaacagtgcatggtatgagagaaagggcaggttaaggcactcagcttcactgactggggtggagattctgatggtttgtactcaggttccagatccctgaggctcaggaacctttgcagtttagtctggttacctgtggcccagtggttacaacagaatgattaacagtcaattctttgcatctctgggtggctcaggaaaaatttaaggagttattagctgtgaactaaccttaagtaagttaaattaaaaaaaaaaaagttcttaagctaatatgattttaaatatctgcactgaagtataatgcaaatttaaattcagcataattatttgcttgttgttgactcatttgaacctcaaaatataatgggattaatttatactttgggtttattactttaagatggctcagcagtctgcaggtggacgagatactcggtttttacgtaatgaaatttgccaacttgaaaaacaattagaacaaaaagatagagaattggaggacatggaaaaggagttggagaaagagaagaaagttaatgagcaagtaaagcactttttttttccatgaatcttcactgttcaagttacctggctttttattattattggtaacaatatcaatttttatattgtatgttatatttgaaaaatgatgtacacttatctctaaggttttatatcactgttcattttgtcatcaccaattttaaaatataatggtacttctagtgaatatgacttgaagattaattctttatatttggaagtacatttttctcaggacatcaaacttgttacctaaaattaatgcttttgtctggaagattggtatcaagtaactaatagattttcataaagaagtgatctttctagtgccatagtttattttgggtaaaagttatatttgttcatttcaatgtatttatatgattagtagattcgcaaatgaatctttcgatatattcaataatggttaattaaatatcttgtttttggttgtaccttattttatgtgagatatatatatatatgtatagtttttgaaaagttgtgttcatgtcagcagtttataaatcacatatttaaaataacatttttaatgcatagtttttattacctcgttattccttgttataaactaataattcttgcagtgttcacttgaatttagttttaggaaaaaagttttttgcagatcaacttgtatttcctggaagaaaatttcctattttacctcagcttcctatttaatgtattatttatttatttacttaacatttatttgttttttatttcacctgaactgttagtaaacttagtaaaatttggtgcctacatgtggtaactgtcctgtcccttatactcagaaacgttttccacctttgtgtcctttaggtcattgttgtgttatattccatttattttattttgtccattgttctctcagaaattgagggtcatacattttaagaaaacaatgatatgctatttaagagaatgtatcataaattgatttgtaaggaaaagtatccccattcttcatgtatgtattttactctaaaatgttgaagaatcatatagaagttagctatgaaaacaatgtggtagagaaagtatggatcgatgccacttaaatgttaggaagaagctcttagagcattatctgtttagctaactgcaaaacatagcagacatgtggattttttaatagtcatcaaggatctaacttataatatacactggtagaattgcttagggggatgtctgtggttttctggacttttgttcttctatatagacctgtatcagttgacttatcattcataccacacacccttagctaatcagaactaccttgtccatttatatcttagactattgtcttttttcatagtcacacacagagaaaacttgaatatatggcctgtgttcctttttggctgctcaattccttgagatgaaatatgggtatgggttgctttggcaattacttctttgccgttaaccagtcattcagttttattgagtctttacagcataccagaggctgctagttactagtgatatagtgggcaactatgttctggttctcaagaatattcatagtcaataataagcataacatagtgataatatgatacttagggagatacataaggtcatattctggcatactctggagagagataccgtaatcagccttgaggtgcaggatgtgatctgtaaactgagacctgaagtatagttagactggtaagaggaatgaggatatatatggtggttaataaaagaacattctgggtagaagatatagcatttgctaagacctagaggtaagagatgttatggagtatttaggaaactacagttattcattttgactgaaatataagtgaaaatagctttcatagagtccttactatgtgccaggcacttcatatgcattaattcattattgcttatttgatacttgtcatatgagatagttgtcatttctgccatgatacagatgaagaaatggagacacagaaagagtaattgcccatggttgcacagcttataaatggtaaaggtaggatttgaaaacagtcttactcaagagtctgtgctatcttgccttcccagttttattttttatgatcctctggagagataagcaagggccagttcctaatgaatttggttcttttcctgaaaggagccagtgaagagttttgagcacaggatatcatgatcagatctatactttaaaagtttactgtactttgtagagagtggattgaaaagggccaagactagtaaggaaacatttgtgttaattcagggaagtgctaatgatggcatttgcctgagaaagacaagtgtgagagaagtagatgtaattggatgtggtgaatgtaattggttgttggaggagagggaggatggagagtctgcctaattttgtgggttgggccactaaataggtagatagtgccattcattaaggaggaacacaagaggaatttggaaagcttgagattatttcagttttgtagatgttgagtttgaggttcttctgggcatattcaaaaagggtatctgtggatatggaattcacaagagaccctgtacagatgatgaggatttatgaatcatcaatgtagacattattgaagccagagaagtgattgtaaggcacgtctctgagaaatgtctaataaagcaatgaaataggaagagtgcttcaaggaaaagctcaagaaaggagaaacagagtgtgatgtttgagaagacaagggaaaaaaacattaatagcattaaatgctttagcattaagttcttggcttctcttcttgtaaaaatttcccaattcagaacacagtgggattattaactttcaattgataataataatgataggcaaacttctaaaatttgtattgtagtttgcattttattataaactttctttaaatttttattttgaaaaatgtcatatcttcataaagattgtaagaaacacactgttggtgttaatgtaaattagttcaaccattgtgggagacagtgtggcaattcctcgaagatctagaagcagaaataccacttgacccagcaatcccattactgggtatatacccaaaagaatataaatcattttcttataaagatacttgcacacatatgttcattgcagcactattcacaatagcaaagacatggaatcaacccaaatgctcatcaatgatagactggataatgaaaatgtggaacatatacatcatagaatactatgcagccatcaaaagagaatgagaggtcaagcgtggtgactcatgcctacagtcccagcactttgggaggccgaggcaggcagatcacttgaggtcaggagttcaagaccagcctggccagtatggtgaaaccccatctctacaaaaacaaaacaaaacaaacaaaaattaactggtcatggtactgtatgcctgcagtcccagctacttgggaggctgaggcaggagaatgacttgaacccagaaggcagaggttgcagtgagctgagatcgcaccactggactctagccttagcaacaaaactagagtttgtctcaaaaaaaaaaaaaaaaaaaaaccggaacaagatcatgtcctttgcagggacatgggatggaggtggaagccattatcctcagcaaactcacacaggaacagaaaaccaaacactgcatgttctcacttataagtgggagctgaacaatgagaacacatggacacatggtggggaacaacacacactgggacccgtcaaggggtcggggtgggagaacatcaggaagaatagctaatggatgctgggcttaatatctaggttatgggttgatctgtgcagcaagccaccattgtacacatttacctaagtaacaaacctgcacatcttacacatgtaccccagaacttaaaagttgatgggaaaaagaaaaacaataaccacccacatacccttcatatagattcaccagttcttaatgttgtgccaactttgctttatctttttgtcagtatttttacacacacatgtatttctctgtctcttgtttgttcaatcacattttttgctgagtcatttaagagctaattgcagatatgatactttgcacttaaatatttcagcttgtctgtttgaaaaagaaagatgttctcctacaatgaacacaatataattgtcatgctcaggaattttaatattgattcaacaccattatctagtccataatgagatttcttctaatggcccaataatatccttcagtctccccacctccaatatccaaagttctgtcaaggatcacatactacatttggttctttattatagactttttaaatatcgttgtataccattgtgattctatcgtctcctttaataaagaggagaaccagaaaaatgaaaggtcataagaggaatgaggtttggagaataggtgaaaaaaggcatcataatgtttataataatgtttgcctgttcagagaaacaagaatcacagataaagtcacttatatgtagataagagaatgctgtattactttttgctattctattcactgatcatttttctaagaactctgtatgcttcttgtttaactcttatgtcagcatgtatgagaaaactgagttaaagagatgttaagtaactcattcatgctttactagaaattggttgatgagggacataaacctaggccggtgtgattttagattgcttcttttaaccattgtgttgtattgccttatatttctaagtaatttatgttcactgagagcaaataatagtctagctatgacttagaaaagtaaaataaagatgttgggcagaaaaccattttattaggggtttttttggaggagcagattaatttgtttctgtattctttggttagtttgtgtgtgtgttctttttaattctttaaaatgaaactgtttaatccttaaatccttaagttttgaaaattttggcctattatttatgtgttaggttgatattaaatccttaatagctttaacattttctactttgttagagaggatttaaaatttaagtagataagctgaatatctggctttatattaaattactgctgatggccaggcacagtggctcatgtctgaaatcctagcactttgggaggttgaggcagatggatcacttgaggccaggagttcaagaccagcctggctaacacagtgaaaccccgtctctactaaaaatacaaaaattagccagttatggtaatgcatgccagtaattccagctactcggtaggctgaggtgggagaattgcttgaaccgggaggcagaggttgcagtgagccgagatcgcaccactgtactccagcctaggcgacaaagactttgtctcaaaaaaaaaaaaaattactgctgaattttatcttcttcttatttattttttttttttactattttagttggctcttcgaaatgaggaggcagaaaatgaaaacagcaaattaagaagagaggtaaaaaattttagtagttgtggtggttcaacaaaggtacttattaaaataagtacctaagtttacataaatttatattttaaccaggactggagtcttctaagtaactgatgttttcagactgattttatggtatgactttgtctcagggaaatagaaaacaaagcaaaatgtgaggccattaagtattacattcatctcaggtctatgcgggtaaatctttttttgttgttttataagccattctttgctagttttctaattgaatagatgactggatttctattcttatttctcttacccagaatcctttaaaattttttgttacttgtggaatcttataaattctgattatcatttggttctactgagccaaataatgtttgtacattgtttattctgatagaagttcttaagtttctaacataattgaaatattatttgttttggtagataattagtattctttctttggttattcaagataatatgcatcattttcccaaaatttttttgttttctttagtttctgattattatttttaattatgtattacctttctcatttctaattaccgttttcctgtccttttctgtagaacaaacgtctaaagaaaaaggtgaggctttaagtgtggtgaaatcttgggaatttaaaatatgttgtgagagcactatttagaggatatgattttgttattctgaatagttttgtaattgaatgttgtgtttggttaccttcagaatgaacaactttgtcaggatattattgactaccagaaacaaatagattcacagaaagaaacacttttatcaagaagaggggaagacagtgactaccgatcacagttgtctaaaaaaaactatgagcttatccaatatcttgatgaaattcaggtaaaatggctagaagtcaattcagagcaatggttcctaaaaactttaatttcattacaatgtaaatataatatttagccctacatgtaaattccctggtataaatctgtcactatgtacttgtaaaatgtgaaataaattacatctttgaagttgcaactttttagccatttttatatttgcctgtcttggtcattaagaacaattgaggtccttatgtactattttcttgattcaatttgatttaattggtcaatgccaattagtaaaggtctataaagaattctctttttttctagaggacacttatggctgcgtttaattttaatttggtttaaatttcagtttttttaaaattactttttaattatagtgtctttaacttttttagactttaacagaagctaatgagaaaattgaagttcagaatcaagaaatgagaaaaaatttagaagagtctgtacaggaaatggagaagatgactgatgaatataatagaatgaaagctattgtgcatcagacagataatgtaatagatcagttaaaaaaagaaaacgatcattatcaacttcaagtaagaattacttttagaataacttatttattcagacttcatattatctcattactatttatttgacactagaaagtactttttctaggatgtgaatttttgtctgtctttttaatagtgtaatatcttgtcatgttggtatatttgtccatatgtgtttctccaatcacctcacaaacactaatttttgcaatttaggatatataaatgatacttgaatgaatgtgtagatagcagtcattatggggttttctataaaagactactgaaaatcctgtggatcataacatttcattttatcttaaaataaatacattataaatgtattagaaaccaatacattgttcagtatttatgtggattaaatttgtttaaaaggtagaataatgtttaaaaataaaattttctagtaatgaaagataattatgcaattataagatgcagaaactattaaatgtcacctataattccaggatgacttcaatgataaatacacatatgtaatgtaatgtatccgtatgtatgtgtatataagtatgaatacgtatgtgtgtgtatgtagatatatttatatatataatgtatatgtaaatatgcacaggtgtaaatatatgttacatcagtttgcaacaactcttgaaataactttgtcttttaggtgcaggagcttacagatcttctgaaatcaaaaaatgaagaagatgatccaattatggtagctgtcaatgcaaaagtagaagaatggaaggtattttttttcaattgacataataactttttctttttgtattttagatttaaattttagtcttatttttctttaaatgtcttatactggtttataacacgtttattagggtttttaaacataagtttattttatttattggttagaaaagctctagaactgtcctttttgatctctagctaatttgttattgaatgacctctttcacatcaatgagtttaactttaaactttttgatagaagtctaactccaaaatatatttggcatctaaaatatataattcgaaatataatttaaatttttttacttaactcatagttaccttatatacattagttaaatagttgcaggtttaattttagtttttctaactaaatgtcaggttcatcagtgggaatgggaataagcaaagggatcagaataacttgggaagccttttcaaaatacacttttcttcctcaccaccactctccaaccttaaccaaattgtcaggccttaccatattagaagctgggattatgatggttgtatacttgaaaaacatcagagattattctgaatgaataattctaattttaaaaactatcacttctagagtcattgctttctagtatggttcacataaatcttgtgggcagtttggaactggttagcatctagggagctcagataacctatattttaaacaaaagcattagcaatggaaataaggcctatagaatcagtcatgtctccataaactttatataaagggccagacagtgaatattttagaccacctggtctctgctataactaaactctgcttatagcatgaaagcagccattgacaatacgtaaatgagtgagcaaggtggttttccggtaaaattttatttacaaaagcagatgggaggccagatttgacctttgggccatagtctaccaacccctggaaaaaacagttgtctttaccagattgaatgttggcagggtaaatggtgacatgttatatgtattctgtactttgttttgacttaataccatttcataattattttatatcagtacgtatagtattgctgttctttttaaaggctatgtaatttttctttttatacaggtgttaatttgataatttgtgaagtttatgaagtttccaattttggggttgtaaactgttttaatgaatatccttatatatgttattttgcaaatgtacaagtatatctgtggaataaattgctgcaagtgttgtaattgtcatgtatgttgcaaatacattctaacagtttgtcactttttttgctttatggcattttttgctgtgaaatatttctttttatgcttagttaaatttattattttttaatgacttttgacatttgttataatgagaaaggcttctgagtataaacttgttttctcatcttttctcctaatatcttgttttgtttttgtttttgtttttgtttttgagacagagtctcactcagttgcttaggctggagtgcaatggtacaatctcagctcactgcaaatgccacctcctgggttcaggtggttcttgtgcctcagcctcctgagtagctgggattacaggcatgtgccgccatgcgcagctaatttttgtagttttagtagacatggggtcacactgtgttggccaggctggtcttgaacccctggcctcaagtgatcctcctgcctgggcctcccaaagtgctggaattacaggtgtgactctgcctggcctttttttacatttaaatcttcgaaacatataattcattttgatgtaaggagtatcatgtggattcaacagagctactctgttgtccaaacatcttttattgattatttcatcttttattgaattgattgatctattttctagcagtgtatacttgttttaatttgtgtatgttttaatatctaaaaacgttattatttttctgcttttagacttctttatgaatatttttaatgtgaattatagaactggcttgtccagttcttaaaaaatatcttgtggatttttattgggtatgtgttaaagttataaattgttttatagattgatttaggataaacctttttatgttatttggtccttctagctaaagaacacaagataccttttctttcattcattcaagatattttatgcctcttggttgcattttaatgcatacttcataaagatcaattgtataaaacttttcacagttgtatggaagtacttcttgtttataaatgagttttgaaaggttgaaatatttttaaagattgaattataaaaaaagaaaattcggtatatattttaaaatcattttctatttgaatttcaggttgtatatacaaaaggaacagagattatgccagtagttgctcatactttctcatttcaaataatttttattttctgtatcataaatctactaacggtgtttattatttatgataatgaagaatgttttattaactttccttttgcataacagattctattgtgtttatttctagctaattttgtcttctaaagatgatgaaattattgagtatcagcaaatgttacataacctaagggagaaacttaagaatgctcagcttgatgctgataaaagtaatgttatggctctacagcaggtaaaatcttaacagaattttgtttatcaaccagttttattacagttggaactctgaacgatgtcttttatttattatatcatcagtgcctagtgtagcggctggtactaccaagtgtataataatgtcttttgaaatttcttctaccacctggtcccaataaaaaattagaattaagtttagatcacggattagacttagaactagagttactgtgtttatttttctatgtttatgtggatagtacacacattgttttggttagaaattatttaacaagaaatgattaaaaacttttagaaatttaaaataattttatactcttttaaggtttattttactgtatcttagtcctaacataccctatacaatgtgaaataagctaaaagcatggttataatttgactgtgctacctattttatttttagtgaaaataacccaaataaaaggaagtaatacttttattatttgtgctgtagttatagtccacaagtaagaagatgatttgaaaagtgtatgctgaataagaacaattacaggggacaacattttttaataaagtacgaaaggggaaaaagctaagttgaataaaagagaaagcacagagcaaaacagaaacatacaaaatggtaaaaaggtggaattgaatggaggatgaggaaagtaacatataaggaagtatagaagccataaacattagggagttctggaaatcctattttccagagtgttagccattatatccatctttcagtattggagtaacagcagtgtacctatcattgtgtattacagttgaagtgtacaaaatggtaaaaggcatacttgtacccacaagaaaatatgttctacagtcttgttgaaaaaaatcagacgtacttttttccttacctttttaggttaatattcatgaagggatatatattgttttaaaatattttatagggtatacaggaacgagacagtcaaattaagatgctcaccgaacaagtagaacaatatacaaaagaaatggaaaagaatacttgtattattgaagatttgaaaaatgagctccaaagaaacaaaggtatttttataaatatatagttattttatatacaattatgtttttaacgactttatttttattaaaataaaatgtcaagtcaatattgagttttctccatttgaattttatattttcaaaaaattgtacaagatatttattattatacttatattactagtgcttacatttgtaaatgatggatgcattttctattatttttctcctctggtgaaaattacattaacgtttattaccaggtcactggtatgaaagaaatgaaaaattgtgatacaattatttttatttaactttttataattaacaaagaatggaagataataaaattttgaccagtgtaacagcattgcagatagttttcagaggtaatttcacattaatcttacccaaattaatgtttcatcatattctccttaccctgagccatattaccttttttaacacatcaaattctatgaatataagttcttacaatatctgtgttgttatatttccatagcactacatactatagttatgccagggcacactagtgcgaactgttcatgggaaattcatggacatgtttattataattggtgactatgtatatatgtatacactacatttatacacacgcgcatggaatcactatttcttcttcatgtcatatatatatacatatatacacatatatatacatgtcatatgtgtgtgtgtatatatatatatttgtatatatgacatgaagaagaaatagtgattccgtgcacatatgtgtgtgtaagtgtagtgatgtgtttgcaggtacggttgtaatttcaaaaatgaagcaaaagccttgctcaggagataattgaaccaatacttaaaggaagtaaaggagtgaaacatgcagatggctctaagcagtgggaataagttcaaaggcagtaaagcaggagtgtaccaatcatgtctgagaacaacaaagaagtctttttggctggagtagagtcagcaagtgaggcagtgataagaccagagaggtaaacagaggccatatcatatggggccttatagttcattgtgcagacttggcttttaagtgagaagggacaccggggaaagtttctgaagatagaaatgatataatttgacttaggctgtgtttgcagtagactgtaggagtggtaaataagaatcagggagacctgttagaagactattgcaataatctggagaaaagtgatggtggtttggggcatggtggtagcagtggagttactggatgcagcagttctggatgtattttgaaagtgataaaaatggaatttgctaacagatcagatgtaggatgtgagagagagagaactcttggtctgaaccaaaagttttggtcatggtggggttgtgggaagagcaggttgagagataatcaggtacttaattttagacatgttaggtttgagatgcttattagacattcaagtgaaggtgttaagtaggcacttgtatataaaagtttaaggtttaggacaacaatctaggctaaagatatgtttggtaactgtctctgtaaaagtaattgaaataatgaggctggctaagatcaccaagggagtaaatgtaggttaagaagaaaaatctaaagagcttctactttagcagctggggagataaaaaggagctaccaaaggagactgaaaaggaaagcccagagagctaggaggaaaagcaggagtatggagagccctgaaaaccacatgaggaatgtaaccaaggaagaagaaacaactgctttcagagctgtgttcattgctgctgataggtcaagatgatcactaaaagttgactattggacttagcaatggtcatttttggttcaagagaaaatgggtagagaggaaatgtaataaagaaatataggaacccttttccaggactgtttctataaagagaaggagaaaacaaggtggtagcttgaggggaaagagggattaagaaaacatttttctctttaagatggaagaaataactcatgattttaggttaataggagagctccattaaagaagaaacattaatgaatcaatgaagtggagagagagaacttctggaacaataatatttttaagaatgcaatgggatgggatcctagtgtgccagtgaagaggttggccttaactaggaacacagagttcatccataattgtagaaaagaaggtagagtgtatagatatcgatgtaggtggcttggtagacatcctggtaatgggaatttgtggaagttctaaactggttgctgcttttttctcagtgaacaagggagcaaggttcttagctgaaggtgaggataggagaagatgtttcataagtttgaggagaaagaagagaagtgaaagtataaaatggtcatctgaaagattgaagacgtggagaatgtggtatgactgttgagtaacttcaagagcccacgatatatatatgtatttctatttatgtgtttattatatttgtatcagaacactttgaaagtagtttaaactgctttaaaaggatgactaatagtatggattgtgcgtattctaattactaggagaaaaagtggcaattgatctctgctgtcaaataaggaaaaggacttatctgataacactttagtcagtccgtagttatataatccctaaagctcacagaaggtgtgtgtactagactgtactctacatcttgaacttaacttgtaaaacgtaatggctaatggtattcttccttcataagattaggattaggtttagttatcaggaacagagagctgaagaataatggcaaaatcaagatagacatttatttctcatctatgtaatggcctagaattaagcattccagggtgttgccttcatctgccccatccaaaatggatggaatgcagctttatctcatgtctgtgtcccaaacagcaagacagaggaagaggggcaagagttaaaagcatgtgctgaaggataggcaggtaaatatagtgtttattgtgtagggccatgtggaagaatgataggagaatagatatgtggatggaagggagaatagatactgggggacaactcagcctgtgtcatgttccacagcttagatgttagctccagacagctgtgctcatttcttaaaaacttttgtgatctcaaacgtactagttttatgcctaagtccaatattaaatatataacctatatattagtaaatgcttataatgaatgagtgtgagaatgatctgtcaatcaattttggaatgatagcaatattatgttttggtcttttaacaatttagtaagatattacaagtaggcatttaggaagtttttagcttagtttggattaaatttagctgcaagtgacagaaaaatcaagcataatacaataatttaaacaagatagaaatttatttctctataatatagacaaagttgaagcaactagggcaggatttgtgtgacagatgctcaaatatcccctatcaggaaccctgtctcttgttgctgtgcctatctcaacatgtggtttctaactcatgtgaagttgccaccctcatatccatgtggatttcagctagcaggaaggaggaaagagaagagagattactcctttattttaaaaacatttttttttttttttttgaaattcacatatgaactttgcgtttatattccattactgacatgaccacacatagctgcttgtgtgtaagtggaaatttagttctttatttcaaatggccacgtgtcaagctaaaaatccatagttttagtacagtggacaaaagggaggttaaatattaggaacagctagcagtctgtatcacaatgatcattttttgtaaagcagtattttgcaaccttttaaaatccataccccttcagctaagaaggttttactgaacttcagttttttagtaaattgtattagtaaaaccaaaacaaaactttcatcttacaaatataaaatgacaactttaaaggatttttttttaatggcataccacttttcttgccaccatgttgggatcactgatttgaaggaataagtagtcaattcaattcatgatttttgtttttactctgtaggtgcttcaaccctttctcaacagactcatatgaaaattcagtcaacgttagacattttaaaagagaaaactaaagaggctgagagaacagctgaactggctgaggctgatgctagggaaaaggataaagaattagttgaggctctgaagaggttaaaagattatgaatcggtatgtatttttatcttgtcattcaaggagcttagaattattcttgccattcacagactattctgtgctatttactgcataccatttaaaaaacattccataagtatcttttgataaagattatcctcattaatttatactaaactattgaaacctttgagcatttactttttgccagaattgttttcaaacttttgatcacagtgatttgtccaaataatcagttttggtgaagcagcaggattacttttttttattatctgtgttcattgggccaccatgtagatgtgacaccactggccaatttgacagaatttatgacaggaacatactgtgtcaatacaacctgctctccactttttatactttttcattggttacaactaattcaagcaactaatgacttacttattctactggtattgctgatttgcttttactaattcttttagtattttggtaagtgttttttatatgtaatgcatattcagagtcactttgcctttaggatattatactggaaagttttaactgttgcatattacatcattattattactggatttggtttataaaagcacaataaaaaaccagtgtaatgatataaattataggcatatgtacattttcctttagacttagtaaaaaaaaaatcatgaacttgataaatttattcaagtaaaccatgttatattttaaattaaattggatatttttcagggagtatatggtttagaagatgctgtcgttgaaataaagaattgtaaaaaccaaattaaaataagagatcgagagattgaaatattaacaaaggaaatcaataaacttgaattgaagatcagtgatttccttgatgaaaatgaggcacttagagagcgtgtgggtaagccatgttttaagttacatagtttgcgcaacctgatttacaagtctttttttttaatttaaattttgtttattattatttattaagtagtttaatgcttttttcaaatgcttttataaaacatttaatacaaataaaagtggagctaacctgattgaagtggaatcagattttatggggttggagtggtgggtgggcagggctggaacattgctttatttggtctagcatctcctcagtaatagctgcttgtttaaaaagatgaaagtttattaataccacatatcagagattaacctttttttttcccaacaaaagtagggtctgtattacccatgtttgtttgcaaaatgctcttgtaacagatgagatatttaaacttcttgctctgtgttgtgattctcctgcctctgcctcctgagtagctgggattacaggtgtgcaccactatgcccggctaatttttgtatttttggtagagatgggatttcaccatgttggctaggctggtctccaactcctgaccttaagtgatccacccgccttggcctcccaaagtgctgggataataggcatgagccaccgcgcctggcctgttaaaatcttttaaagatttttaagtacttgatttttataatttagactacttacgttttactttgttcgagtattttaaggagtaattagtaatatagcttgagagtttatatatttattttaataaatagcctattagttaatattactaatttgagtgttatgatagtgcagactaagttgctgctttaaaatgaaaataaatatctaaatatcaatttcattattgctaaatttcatttaatgctttcttagttaaaaatgatcatttgtaaaaactattatctaaagaaaagacaaatagacaaataagtattttatacagatatatatgtgtgaaaagtatctaacttggatccgtagttgtgctaggaccccaaattagacttctgatcaacttggactatcagatcacagccttctgatcaacttggactatcagatcacagccaagaatctggaagttcctaaagatgacttctggcccgtctaggtagctgtcatagacatcatattttctgtgcttaaaaagctccaaatcttggtttataatttcatttaggtttttgttaggatttccattaataattgtgataaaattttaacttgggttacagtttaaatatctggaaaattctttcacagaaagttacctcattcttcagtgatactggctaagtgaattataaccagttgcttgatggtatatgacatttttgcagcttatttgaatgtttttaagtttttaattatattgctttctattgtaggccttgaaccaaagacaatgattgatttaactgaatttagaaatagcaaacacttaaaacagcagcagtacagagctgaaaaccagattcttttgaaagaggcaagtgtggtagtcagttgattattttcttggctgaactatagagaaatactaataatttatactttgcagattgaaagtctagaggaagaacgacttgatctgaaaaaaaaaattcgtcaaatggctcaagaaagaggaaaaagaagtgcaacttcaggtatactcagttattctaaacctttaaaaagaattattgataagtgagttgtctggatatgaaattatttgtgtcttagctgtttttgctgttctattgtggatctgctacaaatttaataaatgacaataataacctgaaggagataagtgagtgtcagtgggttcagtcctgaatctgaaatagacaaaaacaaaacaaaacaaaataacaaaaaccaagcaaacaaaaaagaaaaaaaccttagaattatggaatttttgaaaagttttatagtatagtattttaatttctagacagcaccaatatgttgttattaataataataaaacttagtagtttttatgttaatatatgttactcaacattttccctttccttaaggactatgcattgaaaagcttttcttgtaagttattattattattattattattaatatttgagatggagtctgtcttgttctattgcccaggctggagtgcactggtgcgatcttgctcattgcaacctccgcctcccgggttctagtgattcttgtgcttcagcctcctgagtagttgagactacaggcgtgagccaccacgcctgacttatttttgtatttttagtagaaacagggtttcaccatgttggcccaggctggtcttgaactcctgacctcaagtgatccatccactttggctccccaaagtgctggaattataggcgtgagccaccatgcctggccttaaattattcttttctaagtgaaagtaatgttttattgaatataaattaacatctttcttgggtttattttacttgagctaaagagaacagttggttaagttttataatagccattgcagtgcttttttgtaagaagaccacacagaaggactgtctttttcacttgccccaaatccccaagcacgtatatgagtaatagcagagtggttctttttagcattatgatttctataatacatccaaaactttctcaagaaaaaacttcatgatttattagtacaataatcagtttactcattactcatcatttatatttactttatatgtcttttaactggtgcttattaagtagcactttaatatagaataggcaaagaatggtagagaagatgaaattcaaaaattaggttctcacattattaatagttcattaaaagtgagctaaatgagaagcttgtattggctatgtagaattttggagggattttggaaacaattattctacctttgcattaaaacttgattgtaggttttaagaattaaagtgttggaatagtaggagggttattttaatgtttttagtttgttaattctcttatatataggattaaccactgaggacctgaacctaactgaaaacatttctcaaggagatagaataagtgaaagaaaattggatttattgagcctcaaaaatatgagtgaagcacaatcaaaggtaatagtaaagtattgcaaagagagtaaaggaaaatatttttttttttttttttttttgagacggagtctcgctctgtctcccaggctggagtgcagtggcgcgatctcggctcactgcaagctccgcctcccgggttcatgccattctcctgcctcagcctcccaagtagctgggactacaggcgcccgccaccacgcccggctaattttttgtatttttagtagagacggggtttcaccgttttagccgggatggtctcgatcttctgacctcgtgatccgcccgcctcggcctcccaaagtgctgggattacaggcgtgagccaccgcgcccggccaggaaaatatttttattgtgttttcatttcttccccctttatctcattcttgaacatctaatcttattattgttgttaaataagtagagggaaatatttgcttatttaacctgttgattcaaagattgattaatgagacattatttactctgaatacagattaggagttcagataaagcagagctgctgcataggagatcatcattcaataccccacagtcagatcagaatgagacagaagagaatatgaccataggatcattatcaagaatgttatctgaaattcaccatagtgtagaaagtggaatgcatccttttgtccctttaactagactttcttcatccatgcaagttaaagagaattcaactccagaaactattacaataagagagatttttaaagcaccatgtctgcagtcttcaagaaatctagaatcgttagtcagcacctttagtagggaaagccatgaagaaataaatgacatatgccttttttctgatgactgtatgaagaaggtgtcaagaagccatcaagcactagagaagactagttttgtacaaaaaagcaattcatcttttcatggcttatcaacagcttcagacataatgcagaagttatcacttaggcaaaaatctgcaatattttgtcaacaaattcatgaaaatagagctgacatggataaatcacaagtagcaacattagaagaagaacaggttcattcccaagtaaagtatgctgatatcaatttgaaagaagatataataaaaagtgaagtacccttacagacagagatattgaaaaataagcttaaggttaatcttccagaccctgtgtctattactgcacaatcaaaattatctcagataaattctcttgaaaatcttatagaacagttacggagagagctagtatttcttagatctcaggtgagtttttctccaaattatatttctgtggttgttcttttatgacgtctctaacaaagttctgtaacaattatagttagaatatttttgtttgcactttaacatcagttatacacattgtactttttaaaatctaaaatgcagtacattgatatgaactcattgacttgtctaatttattaaatttttctttagaatgaaatcatagcacaggaattcttgatcaaagaagcagagtgtagaaatgcagatatagagcttgaacatcacagaagccaggcagaacaggtagtgtaaaggcagaacattaaaagagatgattgtggtactaaagacaaaaaccgttatatctttttgcctcttaccatggatgttgggagagggagaaagtgggattaagatcaccatctgctttactgtttagattttagtttatttttatgattgctgctatgtcttcatagctcgttttttttgttttgttttgttatacttaattgatcaaacttttcttaacttgaaaattatagacttgtgatattttgttgaaaaaaatcaattttattctctctgcttttttcagaatgaatttctttcaagagaactaattgaaaaagaaagagatttagaaaggagtaggacagtgatagccaaatttcagaataaatgtaagttacaattatcttttacttttctgttcttatttttcctatacttaaaatcatgggcctaaaagggcgttaacacattctctgttttctaatctgctttactcctaattacctctgtactgtatatacttcagtctgtcactatccagttgatttgccttgctgttttcattgtgagagaatgttactaatatgaattttttgtgagaatatataactcctttttcttgtgtgttcttcaatcaaaatgaagttagaacaccaaatttaaaatactttaatataaagcatagtttaagttaaggcagaagtatgccttatatacgtgtgtatatgcacgtgatataaataggtctgtcatttaactcaactattcacgttggatttatagttgaatttttttgtatgtttatttacatttggatttttccaatgatgtctttggtatatgtgaaatatttgtcatctgtatagcatagtgtaaattgtgaaaaagatctgatcatccaatgagaaaactgtgtaattacagtaaaagaattagttgaagaaaataagcaacttgaagaaggtatgaaagaaatattgcaagcaattaaggaaatgcagaaagatcctgatgttaaaggaggagaaacatctctaattatccctagccttgaaagactagttaatgtaagttatttttttcatgttaatgtttttcccctatcactttagagagattttctgctgtgtacagatctccatagtttctgatgagatatttttagtcatttgaatcattgtttccctgtatgtaaagtgtagtttttcttgagctgctttcaatacttttcttctaccaattggataattgttattaatctgtcttcaagttcactgacattttcctctttatctgtgttcttttggttcaagggtcagcttgagaccttgaggagttttttacaccgactttggagctcgtttttgctgactcttttcttattgggattttcctttcacttatcccatggctttgggctgtatcctgtggttttctagatgagaaagatgatagatctctgcaattgcaccctgccctatgactaaatctttaaaaatggcaaagtcaatctttgctggtcctgtcttccgtatttgaggggttttttcccaaaatctgcttgcttttgttcattttctagaacatctaggtagttttttttcattcattttttatttatgggagtgtagatctcttaggaacttatgccatcagaagtattatgaaatggctttattctaaatgtttaaagatttactcattgctacaagaaagatttagccatcactaatattctatatatatttaccatatagggacttgagaatttcacaggattcagtatctgtatataaacttgaataatatacacattttagattgttaatatttaagtatatgtcatttatgttatctgaacatatttagcgtacattgtcatattatttcccaaatttgtgcttgatttcaaatgggaaaaaaattcttattatttattgaattgtttttttaaaaaaatcatgattaatcagtaattggatactttttaaaataacactataattgttaacagagaatgagagtgatactggtatgttaaaaacttcctgaggcaagaaaataatttgattcccattatatctttctcatactgactttccttctctgattggtgattttgttttgcctctgccactttgaatgtctaaaatgattctttatgctttttttatgtgaacatcttttgtccgtgatgatgcccactactgatactgtgtcccagatcaaacttaattttccaagggcagctctacttagtgaccaaatgaaaacacagtgaatagcccaagaaatcctaacttctatttatgttgacaatctctggaccttcctgaagccactgtttgcatagacttcatttacttttatccgggattgtcattgttttttcagattcataggccctatctgaaattcacaaatcacctagcaatacttctctaagaaatcttcagaatccatgacaatttagaccagacaatgctggattatgcacttcagttcactttttgttactacaaggtatttttcagtgcccccaacagctatcttaactcattctcattttaccaaagtccatgtagacacggcactattcctcaatgagacaactaactagaccaccttgttgtcagtcagagtaccttcctctacctacttttatcttccttatatcctctttgagttagtataagttattactctgcatgacctgctctaatctccttcaggggaaggcttttacaaatctactacctagagttaaaccccagatcaccttcctgagtaggagattgcatttggttctattcattttaccttatttggcttctaccttcactttttaagacttactttgcctttaacagttttttccatacagttcatctaaagtccaaatatatttattagatgtgtgcattgtgtgtatatacttagatatgccactgttggagatttcgggccagtgatgccactctgataatattttaatatttgacatattatttttgcttactcattattcttagataatatcatgttatgataccttgcctttatttttatttatgcttcaactatgtggagaggaagcactgaaaaattcacttaattgaatgttgtattgatcaattgttcaatattgtattccattcctttgcgcatgctttgaatgcaggtgctatataatttcagagaaaaatacctcattttgactgtacaaaaaccccatgtagggagcagagctcacattgttttccccttttagagacaagaaaactaagatacagagaatttaagtcacttgcccagctgttaagtgactgattaaaatttgaaccctggtcatcttattcccgtctggttgtttttctagtctaccagtctattaagattagctaggtgttttttaattgttttaatgaagtaattactatgcttggtaatgtaaatgaaagttttatagattcataaataagaatttgaattggcatactttattatcatgcttggcaatgaaaataggaaaatgcttaaatgtccattttatttaaagacagactgttttttactatgattttactgtttttctccacatttctaatatataatataaatttgctaggctatagaatcaaagaatgcagaaggaatctttgatgcgagtctgcatttgaaagcccaagttgatcagcttaccggaagaaatgaagaattaagacaggagctcagggaatctcggaaagaggctataaattattcacagcagttggcaaaagctaatttaaaggtgagaattttattaaataaaagaaaatgctaaacataagaatgtagatttaataggaaatttttaattttttaaaaagaatgctttatgagaaaatgccccttgaattaattctttcaatattaagaaactggatttctcttataaaattataagtggaaaataagtgccttataagattgaaaagaatacaaaaattctaaatctcatacctaggcatttctaagcagaaactgaagtatggttgaggtaaaattcctggcagggcattcacatatctgtcaatttgtctttctttgggtgtaagagttgtgattctcattgctggatttttttttccagatagaccatcttgaaaaagaaactagtcttttacgacaatcagaaggatcaaatgttgtttttaaaggaattgacttacctgatgggatagcaccatctagtgccagtatcattaattctcagaatgaatatttaatacatttgttacaggtattgaaaattttgttacaggtattgaaaattttacatgtgaataacaaaaatcattggtagtatgtttctttatgtttttatttttattttactttattttaatttttccatcaccaaagcatgcagatagtacttttctcaatatttagtcttcatgtattcctgagttctcaaaatagtaacagtgaaatatattttttatggattttgatgttagatggattataaataaaagcaatttataccattcattccattcatctgcatgagcagcatgttcatacatcttgttcgcacacctgtcattcatgtgaaatatatggttcacaagcagaacaacaagcagctattataaagcagtgttaagtaaatgagcacttttatttcttgctgggtggaaaacaaaagaataaagtctgtcaaggctttttagtgtcatgatagaattgttcccctttttgcattcacaagtaaaaactactttttttttgagacagagcctcactctgtcactcaggctggagtgcagttgcgctatcttggctcactgcaacttccacctcctgagtttaagtgattctcatgcctcagcctcctgagtagctgggactacaggcatgcatccctggctaatttttgtatttttttttagtagagatggtgtgtcgtcatattggccaggctggtctcaaactcctggtctcaagtgattcgcctgccttggcctcccaaggtgctagggttacagacgtgagccactgcacacagccataagcaaaaacttctaaaccaaattattcttcatctttgtcttccctttacgcaataaaatgttaatctaccaccaaagaggaaagggtactctactatactacctgccctgggtttctcagttttgctgtctatataatggtcgttatgaatgtcctaatgacagatccttttcattattttatttgaaatttgactatctataacatcacatacattataaatataattacaaatatatgttcagaatcaatgaaaatatatttttgattatatgggccactatttctctctgctaggtgatccatttgtgagtatacttgagttataattattaagtactcatttttattttggaaattacagtaattcatctttttctcaatattgggatttttattattattttatgttgtctaaggacagccttaactacttattagaatattgctttgtatgtgatattattatttttaaatgtataattttaacattattatttctcttatttacctgaggtataggaacactatcagcaaatattggtagtatggcattgtcgtattttttgagataaaattcatgatttttaatctttgtataagaaatatatcagaagtttgtagtagattagagagtaccaactgggagtctgaaaagctgtccaaagtggcaaaacaggtacttagactctcaatcctaaggctgtatagagctataaacgtggcaagacctttggagtcagacagacccaaactcaaatgttggatccatgtatatggaaagcacctgacaacaagcctagcatatgtacttggtaaaaatgattgccaagtgtagtgttaatgagtttttggatattgagtaagttatttaaatttcaatttcatctttaaaatgaaataattggaaaggataatttgagtgagggtatgaaattatgtgttcataagagagggtatgtggccgagtgactagaggcgagtttataactattctatctaataaaactttgtaatctggtaatttgtgtgctaaaaataactttacctgttgtatagtactctttttttatgccttaaactaaagtgttcaaaatatcatggaaaaatgatctgtgttgcttacagatttggtgacttttaactttcctataatgttgtcagaatatgaatttatactttcaaattcagcatttattctattgtgtttttttttgcattcttatttctaaaccacttttcaggaactagaaaataaagaaaaaaagttaaagaatttagaagattctcttgaagattacaacagaaaatttgctgtaattcgtcatcaacaaagtttgttgtataaagaatacctaaggtataggtattagcaaaactataaatataattgcagtatattcttgttaattgtgaaagtaacgtaagaataatttatgttttgttcttcccttcttcttcttcctttgcaattgtatttttttttactctggtaactactgttaggaacttatttatggagacagtgtagcttaatgattacattaagcctgggattatcctgcctgggtttgagtcatttaacgtttgctttttgtaagagcttgagcaagtcatcttacctatctgtgtctcagtttccttatctgtaagttactttgtaagtaatacccttttcataggattattgtaaaacgtaaatgaattattagatgaaaatgctcggactagtgtgtggcacatatgaacagtttgtaaatgttagctgttgttagcatcattcatcatcatcacaatcatcattgttcatatatgtttatagggaactaacatatttctccttatttctgtcatctcatctaaatcaatagaatgatttccttaataggaattagaatacctaatcaaaggtgatttaaacactaagaataattattatctgacctaaccagaaccacaaagctagttgtagggcaggtcatatttgaaggttgttgttatcgcctatgatggttgtaaaatagctgcatgaattcaagaaagatgatgtgcccattgaagaagaggagcatttttttctacatagcttttatttttaaataaacatttttttctggtgatacctggcagacattgactccgatctcatttgctagaattggatcacatgtccaagtctgaaccattcagttgcaaagagaatgataccgctatactgggtttatgccaagaacattacacatgtttgtggaatgctcatgtgtagacaacagtgtcttacacaacttcaaaaaaataatttatatataaatatgttttaaattactttttaaattcacaagaatttatggtatacaacatggtgttctatatatgtatatactatgctatacaacatggtgttctatatatgtatatactatgctatacaacatggtgttctatatatgtatatactgtggaatggctaaatcaagctacttaacatatgtattacctcgcatacttttttttttttttccttgagacagagtcttgctctgtcacccaggctggagtgcagtggcgctatcttggctcactgcaacctctgcctcctgggtccaagttattttcttgcctcagcctcccaagtagctgagattacaggcatgtgccaccacgcctggctaatttttgtatttttggtaaagacggagttttgccatattgtccacgctagtctcaaaattcctagcctcaagcaatctgcccaccttggcctcccaaagtgctgggattacagcatacttcttcttatttttttttttttttgcactaagaacacttaaaatttactctcttagcaattttaaagtatataatatactgttattaactttggtcactattttaattagacttaagatgtgtttgtattcaaattattttgtaagcatttaacacccaaatttgagagtggggtcagaatgttggaatttgatttctagaattagtatagggtattattttcctactttttttctgtgttcaataaaatgtttataagattcagcttcaattatattataacccatttagtggtgaatcagggaagaatgaaaataatttgataactttgttgccttgcatttatttaaaaaatttttaattctaggctaaaccctttttaaatgaaagtttaacttcttgtgttttcagatactgaatagctatgatacctcttgtgttgagaaaactttaaatttgcataatctgaagttatcttttcttataaacattttattaggtttacagtattgtctttttgttttgttttgtttttagtgaaaaggagacctggaaaacagaatctaaaacaataaaagaggaaaagagaaaacttgaggatcaagtccaacaagatgctataaaagtaaaagaatataatgtaagtaaaacatttttaacattagtatgcaatattgtacaaagtaggatagctagattcaacaagtaatatggatgtgtctttgtgcagaatttgctcaatgctcttcagatggattcggatgaaatgaaaaaaatacttgcagaaaatagtaggaaaattactgttttgcaagtgaatgaaaaatcacttataaggcaatatacaaccttagtagaattggagcgacaacttagaaaagaaaatgagaagcaaaagaatgaattgttgtcaatggaggctgaagtttgtgaaaaaattgggtgtttgcaaagatttaaggtacatctgattcttattttgctttttctgactatgaaaaatttcaaatatgcagaagataggatggtatcaataatgctcatcacctgaattaatagttaacatttattaacattttgtcataattgcttcttctgatttttgtgggatgtttgaattgcagacattcctcccctaaatatttaatgtacccttttgaaaaaggcttttttctttaactaaccatagtaactttattatacctaacaaaatgacagtaattttctaatatcgcctaataccctgattatagtcacattttttacattttttgatcaaagaataagcatttggatgttacatctcataaatctttttaatatagaatccccttggttttctttttctccaaaaaatgtttgaagatgtatctaacttttgtgtgtgtgtcattttacttgttcctgtgtcccttgtattactaaaagttaggtcagaaccctaagttacattcaggtttaaacatttttggcaagaatacttcataagtagtgttctatactttatattgcatcacttcaagagtatctggttgttccatgttttgtaattgattactctgttaaggaaaagacaagcagaccaagtatggtggctcatgcctataattccaacattttggaaggcccaggcaggaaaatttcctgagcccagaccagcctaggcaatatagtgagactccgtctctacaaaaaatgtttttttttttgtttgtttgtttttaattagcttggtgtagtggcacatgcttgtaatcccagctacctgggacattgaggtgggaggatcgcttgagcccaggaagttgggggctgcagtgagctgtgatcatgtgccactgatctccagcctatgtgcctgtataacagagcgagtctctctcttaaaagaaaaaaagaagaagaagaagaagaaaagataaccatatacctccattattaagcaatttagctaactggtgatattttggtaccatacaaataacaaattatttgtcagtcctaatgattttagcatctgctgatgattgttgcctaacccaattattaaaagttgcaaacatcataattttctagttatattatgcacttacatttattaacagacatgcttttgtaaaataaatagcgtttcctcattagcccaggctatttgtttatcttgaagtttagctcctactacaaaggcaagataaatgcttttctctttaattaccagttttcagaatacacacttggtgtactctgcactacctgctttttttgtcccctccgctttctcttttttaagtatcagattagactcacagatttttaaatattccatgtgttttagttggagtcatattcttttgtctcaactttagccaaagagagtcctttaaagttgactcttatattgtcttgacaaaaattcattagtcttttgaacgaagcctcaaagcttgacttgttttctagcataagatgtcttagacttacctacatacttcatgcccatacttggaataaaccatttctttaaagagcccaggttccttttagtggggaaggcatttagataccaaaaactggccactgggcatcattgctctcagagtatcattgccactagtctctcagtagacaagttagaaaaatatgtatatatttaaaccatgagttcatattgttatttccagtttaattataacattatggggtaagtaaatagtatcggatttttactaagcttctttgattttgcacttgtatttttttcttacatagaaaacctttattattaacattaaaatatttgttttatcctacaatatacatacaataatttgaaaaataatacttgaattgatattaatagtaacaacaacagcactgctgccaaacatagtttaaagttttatttcaggtcttattttcttcagaatatatcttgctgagaatgtataggcaaagtattctacacttacttgaaataattgtcttcatgcggttatgttatacatttgatatatagttaggctcatttgtttttcattttttttattttagggatttttttcctttattgaattttaatatatacaatatttatatatgcaaaatatttaatcagagaaatcttaattctggtcttacgcctttcatattattctgctccaccctctgtaggtaacttattatctttctcatgtttcctttttggaaacataaacaaagacaagacaggttacatgacatgtatacccttctgcacctagttttataccttaccttgtagtttatttttaagcatgtaaatgttcaatgttcatgactaaatttggacaggatcataggaacacagaattcaaagtgaaattaaaatgggcttgggttctttactttccactttaaaggttgtaatgggtgatgtcaggctaataaacctattttcagcttgatctaaagcttaatactgagcatcaagaaattctttaataaatataagtgatatttattcagacatgtaataaggaaatgttcatgtcttatttttgtgttagatttttttagaatctacttttgttagagttttataaatacagttagtgtttgagatagaaagagaaaagaattagttttcttcctcttctacctgctcatgaacttgatttttttctcccaacaattgaagagccaagaaaaagggagattcttaagagatgggaaatagaatctcatctacccctgtttcccccagaacagtgaaactgaatcttaagggtaagatagaatagtgtgtacttaacttagatggagaagaaaggctgccaaaatgagatctgaagcgctattacaaatatttccatcgttactgtacttcagaatgaattacaaccgtaagtttttttacttcctcattcataaatttgattattccttataccacttctcagctttcatcattctttattgtacttttctatgtaatgtttgcctattatacagcaacttaagagaactgtaagtttggacatttcattttggtgttgataatagaatatctttgaatagttctatagttgatgagtagaaccatgaaccaagtaacttaaagtccttgatgttatttattacagagaactataatagaagctctcccgctaatgtttccatcatgtgtacaaaaagttttcttgttattaaagctagtccgtttaacttacaataagcataaatagctaagctgtgaaagttacctgtgataatgctaattttcccatttattaaaaggcaagttgttttccgatcataagaaatttagaaaagccatccaaagataaattccgagtgatatattcctgctgtttgttatgttttctcaaattaattgagttttattttacaatgacaggagttattaaagtattttatttttattatgattaagattttcaaagtaacatttcttatatgaaagaaattatgttaatgcatgtttttcttacatgggaaatcatatattttaaaaatgattttaaaattcgttttactttaagttgtattatctttctcaaaagtggctagtgcttgaccagaaaaaaagacaccagcataactcagtgtatctttatttacataggaaatggccattttcaagattgcagctctccaaaaagttgtagataatagtgtttctttgtctgaactagaactggctaataaacagtacaatgaactgactgctaagtacagggacatcttgcaaaaagataatatgcttgttcaaagaacaagtaacttggaacacctggaggtaagtttgtgtgattcttgaaccttgtgaaattagccatttttcttcaatatttttgtgtttggggggatttggcagattttaattaaagtttgcctgcatttatataaatttaacagagatataattatccatattattcattcagtttagttataaatattttgttcccacataacacacacacacacacacaatatattatctatttatagtggctgaatgacttctgaatgattatctagatcattctccttaggtcacttgcatgatttagctgaatcaaacctcttttaaccagacatctaagagaaaaaggagcatgaaacaggtagaatattgtaatcaaaggagggaagcactcattaagtgcccatccctttctcttacccctgtacccagaacaaactattctcccatggtccctggcttttgttccttggaatggatgtagccaacagtagctgaaatattaagggctcttcctggaccatggatgcactctgtaaattctcatcattttttattgtagaataaatgtagaattttaatgtagaataaatttatttaatgtagaataaaaaataaaaaaactagagtagaatatcataagttacaatctgtgaatatggaccagaccctttgtagttatcttacagccacttgaactctataccttttactgaggacagaacaagctcctgatttgttcatcttcctcatcagaaatagaggcttatggattttggattattcttatctaagatcctttcacaggagtagaataagatctaattctattagctcaaaagcttttgctggctcatagagacacattcagtaaatgaaaacgttgttctgagtagctttcaggattcctactaaattatgagtcatgtttatcaatattatttagaagtaatcataatcagtttgctttctgctgcttttgccaaagagaggtgattatgttactttttatagaaaattatgcctatttagtgtggtgataatttatttttttccattctccatgtcctctgtcctatcctctccagcattagaaagtcctaggcaagagacatcttgtggataatgtatcaatgagtgatgtttaacgttatcattttcccaaagagtatttttcatctttcctaaagattttttttttttttttttgagatggagtttcattctgtcacccaggctgagtgcagtggcacgatctcggcttaacgcttactgcatcctctgcctcccagattcaagcagttctcctgcctcagcctctgagtagctgggattacaggtgtgcaccaccacaccagctaatttttttttttttttttttttttttgaggcagagtctcgctctgtcacccaggctggagtgcagtggcgccatcttggctcactgcaagctccacctcccgggttcaggccgttctcctgcctcagcctcctgagtagctggtaccacaggcacccaccatcatgcccggctaattttttgtatttttagtagagatggggtttcaccttgttagccaggatggtgtcgatctcctgaactcgtgatccacccgcctcggcctcctaaagtgctgggattacagatgtgagccaccgcacctggccccagttgtaattgtgaatatctcatacctatccctattggcagtgtcttagttttattttttattatctttattgtggcagccattattcctgtctctatctccagtcttacatcctccttactgccacaagaatgatcattctaaacatgaatcctaccctgtgactcccatgtgactccccgccttaaaaactgtcaaaagctaccggttacctgaagggtaaaagtcaagtcccctacttacctcatgtcatctagagcaagagatgaactagctgagttttctgaccacagtgttctttcttatgtatgttcttttgtacgtgctcttttctatatatagggaaccatttctctcttccagttgttttgctcagtgaatttctattcctgtttcaaaacttgttcaggcattaccttttttttcttaagcatactttttttaatggaacaaagtcactcctgtctacactagttctgcatcttatacataggttttgtacatagtacatatttatatcacatcaaattatatgtgtttacatatctgtcttccttaatggaatataagtcttttgatataaggaactatttaatttgtttctgtgtgttgagtatctcctgtttggcacagagttcaagctaatacatgagagtgattagtggtggagagccacagtgcatgtggtgtcaaatatggtgcttaggaaattattgttgctttttgagaggtaaaggttcatgagactagaggtcacgaaaatcagatttcatgtgtgaagaatggaatagataataaggaaatacaaaaactggatgggtaataaagcaaaagaaaaacttgaaatttgatagtagaagaaaaaagaaatagatgtagattgaggtagaatcaagaagaggattctttttttgttgtttttttttttgaaacagagtctcactgtgttgcccaggctggagtgcagtggagtgatcttggcttactgcaacctctgcctcccaggttcaagcgattcttctgcttcagtctcccgagtagctggaattacaggtgcccaccagcacggccggctaatttagtagagacagggttttgccatgttggccgggctggtctcaaactttggatctcaggtaatccgccagcctcaacttcccaaagtgctgggattacaggcatgagccactgtgcccagcctgtttttttttttttaaaggagaccagtgaagtttcaggaggagggaaagaaaatttagagttactagggagagagtgatgaagataagagatgaaagtggtaataagggaaatagcaaaatatcagggtaggtgggagaaaaagagatttgtaacaaacaataggattatcctgtgaaaaaggatgaaaggaagaaaaaaatggatagaaagatatttaaaacaccctcagcctcctgttttccctcctgtgtattcatagtatataaaactataattatgtactttacttaaaaaatatattattattaccttatcgtgcttatttaatcatagcatgtcctctttttagtctcattaccctgtttgtattattcttcataacacttaatacctgacattgtattatatattggcttattttccaggtactccactcaaatataagttctaggatataatttatttatcactgaaatccattgcttagagtacctggcatgtagtaaataggcattctgttttttcaaataaaaaataaaggaacttaagatatatatttatgttatatcgccagcctttttcctcacagctctattctgttgtacagaattacctactttacaattcctgtgtttcaaggggatctcaaatttaacgtgtccacaatgaactcctgatttctgtttctctcctagtcattcttatttcaatatatgttcagttacctaaccagctagtcaaggcagatactttagagttattctgtagtcattctttttccctaccatttttgttttccaaatgtaatttatgtgtgtcttcttcatcctcgcagctctaacccttgtccaaaccagcatcatcactcatctggagttccacaatgtctttctggctagtttccctgatttctctattgacccctttattctccacagtgcagccagaatgattgtttaaaacttcctccttaaaatctttaaattgttttcttttatacgttaagttaaattccagttccttgtcttggcatgccatgccctgcctggtgtggcccctgatggtctctccaacttcatgttttactactattgactcttatttttgcttactctgcttgggtgctccagtcctccaaatcatttcctgctccaatcatttcaatcattttttcctctcagatcttatagtattccaaatgctttcttcctttggagcatctgggtttactaataaatacttcgtacctcacagttcagcttaaatatcaattatttggtggttaagacatccttcaaccgctctatctaaatgttcctttctattattcactggctcagtactctgtttttattttctttctaaatgtcaacttttttttttttgagtcagggtctcactgttgcccaggctcgagtgcagttgcacaatcatagctcattgcagccttgccctcctgggatcaagtaattctcccacctcagcctccaaaatagctgggattacaggtatgcatcaccatgctcagctaattttttgtgtttttttgtagagatgaggtctcactttgttgcccaggctggtctcaaactcctggactcaagtgattctcccacctcagcctcccaaagtgctggggttacaggtgtgagccactgcacctggtcgatactgacttttttttttttttgagatggagttttgctctgttgcccaggctagagcgcagtggtgtgatctcagctcactgcaacctccacctcccaggttaaagggattcttctgcctcagtctcctgagtagctgggattacaggcaagtgccatcatgactggctaatttttgtatttttagcactatgtttagtactgtgttggccaggcttgtctcgaactcctgacctcaagtgatccacccacctcagcctcccaaagtgctgggattacaggtgtgagccaccgtaatcggccaacattgacatttttagtagactttttgtttgtttacttgcttattatctgctgccttccacactctggcgaaatcctgccacccacccacacacacataggcactgaatgggcagaactctgaaggccagaattttatatttcttttcactgtaaacatcatcatctgtcactgatggcacactaggatgctcagcaactgtgtgcatgaaggaagtaagcactagtttgtgaaggctgcaaaactcttgagtattctaagagttttggccaaaatgaatgtacagctttagtggcagaagctaatactcagaaattgaggccgtatattggataacacaggatttggatgattattttaaaataatattttacattgtatatatgtgtgtgtgtgtgtgtgtgtgtgtgtgtatgtgtgtgtgtgtgtatatatatatgtatgtatgtgtattagtccgttctcatgctgctatgaagaaatacctgagactgggtaatttataaaggaaagaggtttaattgactcacagttccacagagctggggaggcctcagaaaacttaacagttatggcagaaggggaagcaaacacatttttcttcacatggtggccggaattagaagaatgtgagccgagcaaaggggaaagccccttataaaaccatcagacatcgtgagaacttactattatgagaatagcgtgggggaaaccacccccacgattcaattacctcccaccaaatccctcccatgacatatgaggattatgggaactatgattcaagatgagatttgggtagggacacagccaaaccatatcagtatgtatatgtatacaagtattatatatatatgtatgtgtttgtatgcatacatgtattatatatggaggaaattctaattttgtaaaaaactggattgtgagttttaaggagatgttatataaagttaagacaatgtcattttgtggtattggtctgaattacaatgtagtttcttagtgatatttttcctttattcagtgtgaaaacatctccttaaaagaacaagtggagtctataaataaagaactggagattaccaaggaaaaacttcacactattgaacaagcctgggaacaggaaactaaattaggtaagttttatgactctgataatataaaatgattaacatctaataatgaatatttcttatttaaagttccttttttatgctagattaaaaggaagtattttgactaaaaaaagaaagaactttctgcctaataatttaacttaggcagatgaataatcctgtacttaaccccaccaaagtttagttttcagtccttaagttagatttgtttctaatgaaatcatatatgttaaaaatttatgactaagtattagctactttgaaccgtttaacaattaaaactgatgatattttattaatggtattatgagttctttcactgagtgcaagttatattagttatatatcacttgatatttttaaattaaaagataccaggaaacagcaaagaaaatgtgaaaagaagttgtatttctcatagttttactactatattactgtatatttttgctcctatatgcttacatattttatatattttaaattattataaacatggttttatactgtatttagatagtaatatcaaaaatatttttatggccggcgcagtggctcacacctgtaattccagcacttgggaggctgaggagagcagatcccctggggtcaggagttcgagaccagcctggccaacatggcaaaaccccatctctactaaaagtacaaaaattagccaggcgtggtggcagttgcctgtaattccatctactcaggaggctgaggcaggagaattgcttgaacctaggagtcagaggttgcagtgagccaagatcataccacagcactccagcctaggcgataagagtgagactccgtctcaaaaaaaaaaaaaaatttgttttattcatcatacttataaatacttatacaatagcctaatgtgtttgagtgattaaatcactagctttttatatttttgctattgcttatagtgccacagtgaacattttcatgtatatctaacagagatattactgtctcagaaggtattgaaatctttgttgctctcattagagttttccatattaatttttcaaacagttatatagtttataagattttcataattttatctcatatattgtgcttcataattttcaaataaatttgctgctttcgataatgtattttcatgtatttgtttcctagacgttagagctattcaaggtttttattactaaatagagctgttctcttaaattggtaatgagatacttggtttagagaagcctaacactgggaaatcttacataagctacttttagaaatgtaatttttagctcaataagagattaaatatgaattgacttttgtgtagtatttgcatggaagaaggtaccatttaaatgaagacatgagagtattacgtacaattttagtaggttctttttattttatcatctttatttttaataaatgctgaattccctacagaaattctttaatttttacatatcttgatctctttcatatatggatttatatcaccgaagttttaagagtgtttccctattccctgttgcccttatatctttgtttaaaaatgtcacatcattagctttttttcatctaggaatttgttagtgttgggctgttgtgctctaccctctctttaagaaaactccaaacccaaaaacatacaagatggctagtctgcttcagcctttgtgatgtgcttttctcttctaatcagagtttagcacaatacagaatggagaaggactcctttatatattggtatttattgcagtatttttctacatggtgcctaaggttacttgaatgagtctttattccataatgaactgatttactaatgcttttagcacctgttagtgatccattattgttagttacttgattactgcttgccacagctattctaaaataatacattttaaagataaatacagaacataatgaagtactttttaaaactgagatagagaccaatttttttttcaggaaatgtatattactttgagaaaactcagttataaaacttgaacttatgaagctggaaaaacaggagggggcattattggtattgtaaaaggctgtttacaaagtgagttgctgcttagttcctttaagtaattggctaccctaaacacatcagttttaagttgctgaaaagcaaaacactctaccaaattttgttttttttctagaccatgtttacaaagcaaaagtatgttttcttccccccccctcaaaaaatgactaatgacactcctatgcgatgcctttttatggtaaattgaggcttttagttctctttccatttagccacagacttttgtgtccaaagacaagctgcgtaactgcatatataaggttaaggcataactactaataaaagaatgtaaaatatttgatattaggtctgtacaaagaccaaataatactcatgattagacaagattatatttggtagaatctatccatcatatggcttcagattttacttttcagcttggctttgtgagactttaaaaatcaagtcattgcacttatattcacaaagtcacattgctttactgcattgcttctcatacagtttatctcctttcagtaaaatgtttacttgccatttttaaaatttcttatatgtgacacttctacactaagtcctttatgttgttagttccacaattctgtgaggaataggtttttttttttaatcatttgattgatgaagaacattaagttccacagagattaaatggtacaggcatcacacaggcaggaagtaacagagctaagattagagtccaggtctgatggaattcagaaagctaatgtgctttccatggaactataatgctttctaatatacagcatctaaaatatctgaggtaattttaatataaacagcatgagattgacttaaatattattgcatgtaggtaatgaatctagcatggataaggcaaagaaatcaataaccaacagtgacattgtttccatttcaaaaaaaataactatgctggaaatgaaggaattaaatgaaaggcagcgggctgaacattgtcaaaaaatgtatgaacacttacggacttcgttaaagcaaatggaggaacgtaattttgaattggaaaccaaatttgctgaggtttgatattataagttttatcatacaattatagaataaagaattagttttggtagacattgtattattgttaagtggtttgtctggatctctgaaatatcttattaatatagtgcctatgttttgtgtaataaataaataaaagatttaaatctgaattgtttaaaaggaaagcagatatttctgtaagtttttctcaccaatgttatattattagatttaatttatgaaatgttatttactaaacaatggaattgcctttcaccaccatcccttcatttaacaaatatttattcattgcctattacatgtcagaccctgtgttgggactggcagtatagcaagaaacaaaatagacaataatctctactttcagggactttacattctaattggtggttttatatatttttgatgtggtcagaatcattaaactgtgtggcagtaaatatagtttgcaagtatttaacaatttatgattaaacacaactcttacagtgtttgcttaccttgagatttaatatattttcaaagcatttatatcatttttgttttaactatgtcactaaatctatatgagtaagattttattaactcatttggatttatttatagatgatacaattgaagtaaaatataatgagcagattgcattctaagcaaagtaagaatattgcaagttcagatattattagataatgagttgcctaataaaaatgacttttggtggattggaatataaccagagtttccatagtttgtttctgattctttcatattttttaccctccttcagtctgttcttaacacttcacacttaatataatatgtgaactaaggccaagtaaagaggattgcagtactttaaaagctaaattacaaagaaaacctcaccaaaaattgatgtatctgaacattttttgttacatttccttagcttaccaaaatcaatttggatgcacagaaggtggaacagatgttaagagatgaattagctgatagtgtgagcaaggcagtaagtgatgctgataggcaacggattctagaattagagaagaatgaaatggaactaaaagttgaagtgtcaaagtaagtgcatataagcattttagccatttgactagatgtatcttctttaatttgtctttaagaaacccaattacaggtatacaattcttagtagtaattgatactgatttctttttataagaacaggattaagtaatattaagatcggttttaacagggttaaataataatattgacgagaataatattgttaaagaggaagtgacctctcaagatttgcattttttagagttcaggaatattattgcagaaaggtccagttcctccacatattgattttttggggaaggggtgatggaggaggaatggttgtttattgtatttaaacttaagtttcttcattttaataagggagtaatagtacctcttctacctgtttcataaggttgctgtaagaatataataaaaaattcagattttgatttagtttacatttatcgggcatctactatgtactagtcacggtgcaaggtattaaacatatattgacttgtacaattatacttaaccttgaggttatatttttgttttcattttacatgaagaaatatgcccagctagtttagaacacaaaatatatataaggagtaaatactgcgtgctggctgggcgtggtgacatgtgcctgtagccccagctactcgggaggcagaggcaggagaatcgcttgatcccgggaggtggaggttgcagtgagccgagatcgcgccactgcactcctgcctggtgacagagcgagactctgtcaaacaaacaaacaaacaaagaaaaacaaaacaaaaaaaccgtgtgccagctatatgctgtattttcattctcttttgtaattaggtgatatttcagtagaaaagtataaggagcacttagttaatctgtcaagcataaatagtaaaaatattttatggcctactcataaaaatataaccattcctttggagccttgatagttctcttgggaatatcagtttttgacatctttttcactatgaaagacccttttttttaaaaaaattgatcctttcttctcatggacctcttttgatataaactaacttataatagttcattttaatcatattttgttaatcatgcaactggcaatgagagcctctcatcagtatgaggaaacctgccttatctataatactgaactaaaattattctaacccaaagcaaagaaactttacattttgctttgcctgtattagcttatcacagtattcatgagggaatttgaaggacttattaccattaggctatctctttttttttttttttgtaattttattaaatgcatgttttgtttcttttcacattactgataacttgtagattaaaacaaatcaaaacatgcattaatccatctaaggatcctagaaattttacatttctgtgttcttaactgtgtgatggtcttagataaatgtactaaataccttatcctagcatattccaaattatgacaataaatgttttatggaaaaaagtatgggaacagaagttctttggctatatacatttggaaaatactatatagtaagtatgatttgagataattatatatgatagaacctctgggagcactgaatatatgttaggaatattcaagagggaggagggatgttgagaatgaagttttttttatatagcaaacatgataacctctgatggaattatgtttcatgaaacagtttaggaaatcctgttttaatatttcatacaaagaagagatagatgctgaaaacgaatggctttttgaaaaagggtctagaaattttgaattttggcatttacttagaaagtgtacttaattgttcctgaaataccttatcatttcctagactgagagagatttctgatattgccagaagacaagttgaaattttgaatgcacaacaacaatctagggacaaggaagtagagtccctcagaatgcaactgctagactatcaggtatgtgcagtattggctcttctacatagaatccacttttttccctaaatttacattagatgttgggagtgggatatgttatactttttgtttgtttcgagatagggtctcattctgttgcccagggtggagtgcagtggtacattcaaggctcattgcagccttcaccacctgggttcaggtgatcctcccacctcagcctcttagacagctgggactacaggcacgtgccaccacacctaatttttttgcattttttgtagagacagggtttcaccatgttgcctaggctggtcccaaactcctgggttaaaatgatctgcccaccttgacttcccagaatgctgggattacaggtatgagccaccatgctgggccattgttacatttttaatcaaaagatataccaaccagaggctgttattcttgttagttggaacctgattagaaagctctttaatttgaaatattgttcagtaatccagtacagcatttaaatgcctatagatgaattatgctgctgatcaaaattaggacactgagaattgtagttagtaaatctttaataacaatattttctcttgtatttatatgtaactttttacatattcttacgttatatatgttgggaattataaaaacatacacattgtcctgatcagtattatgttacttgcaatggaggttaaaaaaaaactgtaacagtcaggcatggtggctcacgcctgtaatcccagcactctgggaggccgaggcaggcggatcacgaggtcaggagttcgagaccagcctgaccaatatggtgaaaccccgtccctactaaaaatacaaaagttagccaggcgtggtggcatgtgcctgtaatcccagctacccaggaggctgaggcaggagaattgcttgaacccgggaggtggaggttgcagtgagccaaaatcacgccattgcactccagcttgggtgacagagtgaaactctgtctcaaaaaaaaaaaaaaaaaacaccagtaacatacccactgttattcagttacatttggattttaagtttgtttgattctaggttttttcttttacagttctttggtaattatttgtattaaagcaaagttacatttttgtagatctcatgtgccactgtgttaaaactttgcttagtaaattgtgaattttaaatctgtgataactttcactggaaaaatttgaaacttactacaaatatatattttttttaatatcaggcacagtctgatgaaaagtcgctcattgccaagttgcaccaacataatgtctctcttcaactgagtgaggctactgctcttggtaagttggagtcaattacatctaaactgcagaagatggaggcctacaacttgcgcttagagcagaaacttgatgaaaaagaacaggctctctattatgctcgtttggagggaagaaacagagcaaaacatctgcgccaaacaattcagtctctacgacgacagtttagtggagctttacccttggcacaacaggaaaagttctccaaaacaatgattcaactacaaaatgacaaacttaagataatgcaagaaatgaaaaattctcaacaagaacatagaaatatggagaacaaaacattggagatggaattaaaattaaagggcctggaagagttaataagcactttaaaggataccaaaggagcccaaaaggtaaacatttaaacttgatttttttttttaagagacagtatcttgatctgtttcccaggctggagttcagtggtgcaaacatagctggaactcctgggctcaagggactctctagcctcagcctcctgagtagttgtagctggcagtacaggtgcacaccaccatacctacctaattttttaaaatttttaaatttttttgtagagacaaggtctcactttgtcacccaggctggccttgaactcctggcttcaagtaatcctcctgctttggtctctcaaaagtgctgagattacaggcatgagccactgtgcccagccaattttaaattcattatcttcaaaagagttacatgataatttcttaatatatgcctatatgaaaaatgcttaagatacaaattccaattatgattcattaatttagattttataacttagcagtgttggctatttgaatgtctattatacgtaaaaataaaattaggcttttctaaccaaagattttagtgggaatgttcagattgtataatagcaaagaattttaattactataggaaaatttatattaattaaacactaattattatatttaaacattgtagtagttatcagttgatttctactgttcataattatctttgatctacaagtagtgggcccacatttacttttaatatggtttaatcttcatttagaaagaattaaatgaaaaataattatcttgcaactacatcctgttctctaggctagaaacatttaggatttctgtttttgaaagtaataccaaagttccaatgacctgcttatagtcagtgttcaataaacgtataacaaatgaaagtgaatattagtgatgtccattccaacataatttgaagatttttattgtaaaatcccacatatttgtagaaaagtctatggaaatcctaaataagattttgtcatgtagtttgacaaaagataacattgtgtcttattttattttagaatggccattactttcaattaaaatcattatcatcaatggaggaatgttatttgttaatatagcatttatatttgtgtatataaattgtaaatcttaggtaatcaactggcatatgaaaatagaagaacttcgtcttcaagaacttaaactaaatcgggaattagtcaaggataaagaagaaataaaatatttgaataacataatttctgaatatgaacgtacaatcagcagtcttgaagaagaaattgtgcaacagaacaaggttttattttatatttatttcatttttttccctaagttttttttttttttttttttttttgagatggagtctcactctgtcgcccagactggagtgcagtggcgtgatctcggctcactgcaagctctgcctcccgggttcatgccattctcctgcctcagcctcccaagtagctgggactacaggcacccgccaccgtgcctggctaattttttgtatttttagtagagacggggtttcaccatattagccaggatggtcttgatctcctgacctcatgatccgcccgcctcggcctcccaaagtgctgggattacaggcgtgagcccctaagattttaaacaagaatattgcacaaatgactatgttatccttctaattaagtgcaccttccattactaattgattatataataatttgttttttattttctaaactattctaaaaattcatatttatttagcttttataacagtagtcttaatcttaaaaacggcaatacataagcaacctcatttggtaagttaatttttattttgatattggttatttgacttttcacagttccacgtttctactggctctcactgatagagtaagaagtcagcttcttatagaataaagtatatacttcagagacagatgaaattcgtcaaacatatgactgtctcagagattgttccccctgcttaaattgttcttaccctagatacctttggtatttacactgtcagtgcctgcaggtcttagctcaaatgtcttaccttatcagtgtatccttcaccagccacctaatatacaacagtaaatcctactatccagattcctaaatagagattaattaacttaatttttctccaaagtgcttgtaaccttctgacgtattacatacttactggtttattattgactgtctttccttcgccagaatgcaagttccgtggtgacacggacttggttttgtttactgccatgtttgtatttcctagaatgatgcttggcacataatatatgtcatcaaatatctttcgtatagctgaacggatggatggatggatggatggatggatggatagactgaaatccttacttcacatctgcctttgtgatcttacacaagttacttcacctctctgagtttgtatttttttccataaaaggaaaataattacagtttcttcaatgtgttgtgaggattagataagaaaatatatataaaatgcctgttatgtgcctgatgtcttcgtgtatgtgtctgacacaaattgtcctttttttagtttcatgaagaaagacaaatggcctgggatcaaagagaagttgacctggaacgccaactagacatttttgaccgtcagcaaaatgaaatactaaatgcggcacaaaaggtatgaatgattaatcttgtttgttactctgtagcatagtctagagtgttaactcacagaaatatttcctgtatcagatgtaattttaattgatgttatattgtatatttaaaatataagaggggtttaatctatgttttatcatacagctgtaaaaattaatagttactctcaatgctgcaactgcttttttaaaaaacatactatttcttaatagtttgaagaagctacaggatcaatccctgaccctagtttgccccttccaaatcaacttgagatcgctctaaggaaaattaaggagaacattcgaataattctagaaacacgggcaacttgcaaatcactagaagaggtaattagaagaatttgcattttgattagtgtattatttggtatgtttggggggctttctaaataatatttctttatgagggcaatgcatagaatgatgaatctattgctaatttcactatttttctattctcctataatgtttctaatagccaataatgaacagcagatatagttaatttgaattcactatttaattattagttggtacctttcggtacactgaatatgaaaggaaataaaaagcatttaattgtagttctatgagcaatatattctcttatatgatctctttattcttacttttttggttttattttgaagtgcatgttacataatctatgaatcaattttcagttcattgcctttaatgcatggttaaagggttgaaggtaaattagaaattactttctgttttaacctagatcttgaatttgattagtaggtgatcaaatctgtcatcttcattaaattattcagaaaataatgtaaactgaatgtgttttcattttagttttcatctaaataaactgcaaatacatttaaaatatacataaagaagtttttcaagtaaaactgtacatttttaatcatttcaggaaacgtagattttcttcagtaattttaagatttgtcatttatgtgaattgccattgaattacttaatttaaaatactcaccttaatcctcttgaagagtaaaaatttttctgtttttttctctttgttttaataagctgcggattttatattcgtaatttattgagttgggcctctaaaattccagttttgtacttaactgacttatagattagtctcctaatgctctgctagtcaatggaccaaaataaaagaaataatttattacatattcttcctaaatctagtaccaccatacatgtataattctaaactgtaatatctcaataaagtaccttaattaaattttatgttcatcataacaatgaagtttctagcatatgtaatagtcttataaataagcatgcaaataactgctgtcaattagaattagtcagtttaaccttattaagtatcaaatggctattgtacatatgatgtgaaaaataaagtgaattttttttggctaataactaatctaaaattcagatgaagcattttaaagggaaaaagatactttaatgatttattataatttaatcattgcagaaactaaaagagaaagaatctgctttaaggttagcagaacaaaatatactgtcaagagacaaagtaatcaatgaactgaggcttcgattgcctgccactgcagaaagagaaaagctcatagctgagctaggcagaaaagagatggaaccaaaatctcaccacacattgaaaattgctcatcaaaccattgcaaacatgcaagcaaggttaaatcaaaaagaagaagtattaaagaagtatcaacgtcttctagaaaaagccagagaggtattttattatattatgagttatgctgttatccattagtttttttaagcaaatgctaaatattattttaccctaaagtggtatttcttttcttgctttcaaatgattctatttaagaattgttacttgcatgtgattggattacacctctgtcagtaaaactggaagtttgtgtacatgtatctttctattatacactgactaaaccacgagtagctatcatggtgaaatcatatgattttgaaaaatattttaattgagtttataggtgaggattgaggcaatagggtggaatgaaatatatcacaccggtaatcagtagaaatcagatttgttagaacttcgtgggggaaagctaacatttaattttttctagaagtaagttaaaagatgatagatacatgtcattctaatgttaagaataaattatgaactgaggctgggcttgtcaacttgaacattgtctgaggggacatgcataccagtctagatacatacatatatggagatactgtttcttcctcatctcaaaggaattttagaagattgaagagaaaatatataaggtcttcaaaatgtgaatttgttttaatcacaatttaagatatagtttcgattttctgtaaaacaggagcaaagagaaattgtgaagaaacatgaggaagaccttcatattcttcatcacagattagaactacaggctgatagttcactaaataaattcaaacaaacggcttgggtaagattctaagaactttgttccattctttattgatttttgtgaccatgtaaattaaaattcagctctcttcttttttggaatggaagttaccctttttgttgccaaaataatcttctgaaaacatagctctgatcattcttcctcctgtagctcaccgctgttcacaaaattatatttataattcttagccatgtactcaatctgctatgaacctacctgcctttcttttcaaattctactcactgtgagtttagctatatctaacttccagaattcagctcatatttgcctcttttgaccattctgttccatatgtatgaaatgacatgtctttcatcttttaatgtgtaaccttagcatatttgagcattacctcgttaattcggtcaacacttattgatctcctgctacgtgcagacattttgctagctattgtaaatacaaataataaagtctgcatttcctgtcttctttaagccttcattgcctattaaatcattacattttagattagatattatattttgatcatttgaggaaccaaattaaaaatatggaataagtatggcattgaattatacatgcctattgctaatatattcatattttataggatttaatgaaacagtctcccactccagttcctaccaacaagcattttattcgtctggctgagatggaacagacagtagcagaacaagatgactctctttcctcactcttggtcaaactaaagaaagtatcacaagatttggagagacaaagagaaatcactgaattaaaagtaaaagaatttgaaaatatcaaattacagtaagtcttcgaaatgtattgtaaaaataggcaaatgataagtgatataatgaagataaacataagtgtttgctatgccaggcactgttctaagacttttaagtatattgtctcatttttatcctcaggactgctggttacatatgttatcattttccccattttaaagagaggatatggcctcaggaatgcttaatagcatgtctgggggtagatgggaaagccataatttgaaactagtcagtctgactcaaaagccaatacaaattcttttccagaatctcatttttaccttctttgagcctcagtttcatcttatttatttatttttatttttgagacaaggtctggctctatttcctaggctggagtgcagtgacataatctcagctcactgcaaccttgaccttccaggctcaaaccatcttcccacctcagcctgcagagtagctggcactacaggcaggtgccaccacacctgggtagtttttttgtatttttgtagagacaaggtttctccatgttgcccaggctggtcttgaactcgtgagctcaagtgatccgcccacttcggcctcccaaagtgctgggattacaggcctgagccattgcacccagcctcatcatctttaaaatggaaataataatacttaccctggccctttcagggtggttatatgaaggtcaaattataccgtgtatgaaagtaatttgaaaactgtaaaataacatacagatagaaaacttttgattacacacttataagagtgtctgtcatataatagagattctaaacattgttcaaccactttatcagaacgtagattttaaactcaaaataggtttatagttaggtagtttctaatcattataatattatctctatgggcctaaattttattatctgaaaaaacatgagaaaattgaactgcttgacttataattccatttcagctctcaagcccctgctagagtctttgattctttactcacttattcaaatgcctctgacagaattaacactatttttgctttgctaaggagctgccactgttaagaaattactctctaaaagaaagaaaattggcaacagcatatgtgtattttcagtctcttttcctcactctattaaattttgtacaagagatgttatttttggtctagtaaatttctgtcatgttttggagtataaaattacttgtgcttttgcatctaatttgtgggtgtagaaaatcataatcttttgaaataccttatataatacatttttttgccacaggaaatacttgaagttattgttgtgtaccttacgtcattttagtccaaaattatacttgtgttctctgtgtgcatattttgatatgtattaggagattatggatctgtgtgatttcttaagtaaatcctgatattttcacaatttgatgatgactctttaaagttagacttaagttttgccaaaagcaagaagcctcaaagagtaacatttgttcatgtcttaacactatctccctcttattggtcagaatctcagtatggatgcagtgtccatatgcacaacaatatattaattcagtttaacagacttaatgctgaataagcaataagattaattgaattaactaaatcttttgatagtatccacttccatatatatagttatagatataatgctagtgaatttgaaccataaacaaattaataatacatgtgatttctgtgaaaatttatattagtcttttcaatatgtcaatatagggcagtatttctcaaatatagaggatcagtttttcaccattgtccctcttggggacatttggcgatgtctggagacatttttgattgtcatggctcgggggtgctactggtatccagtgggtagaatcaaaagatgctgctaaacatcctatcatgcacaaggcagccccaccaccaacaaagaattatccagtcaaaaatgttactagtagtatggttaggaaactatcatatagaggaagcaatcacattttacaagagccataatatttaaaatgcctttttgttcattctctgtatatttgactagagtcacaaaataacttgataagattgttgccaaaaatattagaaactagaagaaaaatgtgttgttaagtctaagagtagttaaatgaaataaagaattattcttctttggatttggatgcctgcatcaagatttagattgtaaggatacttaggactgaacatttgctctatatgaaatttgtattaatcaaggtatgaattgcagcaaccactctattaattacatatgtttggccaggtgtggtggctcacacctgtaatcccagcaatttgggatgccaaagcgggcttatcacctgaggtcatgcgttcaaactggcctggccaacatggtgaaaccccatctctactaaaaatacaaaaattagctgggcctgatggtgcacgcccgtagtcccagctactcaggaagttgaggcaaaaaaatcacttgaatctgggaggcagaggttgcagtcagccgagattgcgctgctgcactccagcctgggtgacagagtgagactgggtctcaaaaaaattaaaaattaaaaaacacacacacacatatgtttatttacatcaggcttcaagaaaaccatgaagatgaagtgaaaaaagtaaaagcggaagtagaggatttaaagtatcttctggaccagtcacaaaaggagtcacagtgtttaaaatctgaacttcaggctcaaaaagaagcaaattcaagagctccaacaactacaatgagaaatctagtagaacggctaaagagccaattagccttgaaggagaaacaacagaaagtaagtaacaacagaaaattatcaacatttaggaaaaatatgtggtagattgcttttagagaagatttgtaaatttataaaagatggtagtataaatctccgtgttgtaataaaaagtatgagctttatcttatgctgttaaacaaggtattttagacaatgctgtttttgtgggcagatatagtccaatttatctttttatgttttcgtcaatctgatttgtgaattatctatatgaagttaggaaaaatcttaatgtacattacaaaaatataatatatattacattgtattttctttttttctactggaattttatgctactgaggctatttttaacaaatgaacaattttgaacaatttgagggattgagggaagtatgataatgacaaaaagggatgaaaaaagggggtcatagagatgtttttgtgagaaggagttggtcagtgtattctgatttattagggttttttttagtttatctcagatttgatctatttaaattgttttagaagatgctggtgtttttctgtgctagctatgaaatttatgggtaaactttaagcctttcctagtccttttgttgtctacctaaattcaattaatttcatatggaaggatgtagtaagtgagtaatataaatatctaaaattggatgtttgaaaacaaaacatacctgttttttgtaatagcttgatttaatgctgagttctcaaaatcattattaagattttgaactttcacattcaatgtggaaagaattgagtgtaattacaaaagatttatttgaaaaagttgagttgttaatttgtgaaatatgttccattaaactcataatattttagaaaaatagtaggaagtaataaagcttgtttattttttatatcatatattcatataaaatgtcagttttcctttaaaaattacattttttttttggttaatttttaggcacttagtcgggcacttttagaactccgggcagaaatgacagcagctgctgaagaacgtattatttctgcaacttctcaaaaagaggcccatctcaatgttcaacaaatcgttgatcgacatactagagagctaaaggtgaacatcaacacgtgttaatgtaacaaaatttctgataattcctattggaagagaattcactatgatatatagtaattttgttgatgaatagggaatttataatgcactgttggtggctagacatagacacacacatgcatttttcaacaataagtctctttatgatactcatttactgattatcatcttggggattaggaaaggataggccattatgaactactgtttctaatgaaattaaatttaagaaatattttacttaggattttttttaagactttattatttttttagagcaattttaggttcacagcaaaattgagaggaaggtacagagatttcctgtatatctcctaccctgaaagtggtacatttgttaaaattgatgaacctatattgatacatcataatcacccaaagtccaagtttacctctattttagctcttggtattttacactctgtgtgtttagacaaatgtataatgatatgtatccatcattatagtattatacagggtattttcactgccctaaaaatcttctgtgcctctcttcttcattccttcctctgcacctcaccaaacccctggcaaccagtgatctttttactgtctccatagtttcaccttttccagaatatgttatagatggaaacatacagtgtgtccccatcattctcaccataggacagctaggaactcctttctagtggcatacatattgtctagtattgtaagttacccttttatatcttatctttgtaaactaggttagaaattacttcaagtcagagatttgttctgtactactcttatgcttcatagtgtttaaaacgttgtcatatatattgttatatacttgtttgtttaattaattcagccaaaatgaaacgtgcatatttgataaaattttgtttgtgggtgtttgttgaagatgaattgctttacactagttttttttttttttctcaaagtcgacttttttcctcaaggtagacttgacatgaatatggaaaaatatatgtagtttgtggttattttttttctcttgtgtacttaaaaattcagactgaatttttcttataatggtatattttctgttttatgttccttttatcattgatacttcttgaagagtcatgaataatacctttctttttctcttattagacacaagttgaagatttaaatgaaaatcttttaaaattgaaagaagcacttaaaacaagtaaaaacagagaaaactcactaactgataatttgaatgacttaaataatgaactgcaaaagaaacaaaaagcctataataaaatacttagagagaaagaggaaattgatcaagagaatgatgaactgaaaaggcaaattaaaagactaaccagtggattacaggtaattttatatttaactctgataatgtctgatttacaatatagaggtagtagtttatttctactttatcattttatctatggtatttgttaaaactgactttcaaatcactttgattaatgtaattaatttcttttgtgacttctattgtgtttatagttctagagtagcatattagtatgttgtattaaaatgcagaagcagctaccagattatcttatgtattaagtgtcatttagaaagtatggtcagtgatagcttcagaaagttgctattatataattgaaatatttactgtctattttgttttacatttatttgtaaaaatataaagttacattttattttttagggcaaacccctgacagataataaacaaagtctaattgaagaactccaaaggaaagttaaaaaactagagaaccaattagagggaaaggtggaggaagtagacctaaaacctatgaaagaaaaggtatgtgaagaaacatactgacttatatgcttaaggtagtgacagagtaagttaaatacatagctgattaacagttaatatactgccttaatttgatgacctggctgtattaattctgtattaattttgaggactataagcagtattgaataacgtagaaaagtctaagtttctgttctgtaggaatttagagtctacttgaggagatacctataatgtaactcttatttggaaattactacatcaatttcattcatctttctgacattagagtacctctgaagttccttcacaccttaacatattcaactgtgtatcatttctctccaaagtaatcatttacacaggttggtgcttttgacttttgggacagaaagatagacattttaagataccccactttgacccaaataggtcctttttaatccttcaggagactaggctgttatttcagatagcaaagttatttggaatatcttcagtatttgcagtaataatcagtaaccaatctgctcatagattaattctgtgggagaaattgcttaaaattttatagttcatagtaaactgttttgtaataaaaattactgattgaaataaccccaaaaaaaactaaaattggctaaaatgcgtgtaattaaatttgttatggacaataaattggagataacttgttggtaacattcaaaatatcgaaagtgaactgggaaatgttgatgttagcagtaatatttgccattgaagaaaatcagtatggaggagctatggttaggaaaatttttattataaaatttacccagaaaatatttaatgtctataaaataatttcaatcacatgaaaatggaaaagaaaattctgtctttaaaggcattgaatagaaaataggtaatggaattcaaatttcttaatagagtatgctcccaaaattattttctatgaaaattcattaatgtcagtgtaatttattgacactatttgcgtggagtcacaacatgcttgctgtcagaagctttgctggtgaaaactgtaagatcaaagtgtccttaatcttttggatttccatctttctaactccctaattggggataggcctgatcttatccctaaatggggataggttagaaactggtatgtttgttcctaactggtgtgtttctataccagtttctaacctgattcctatcagaatgttttaagagccttgtggctttgcctggactcttctatgctacagtttatttagtttatttattcagtttattcctccttaaagtgggaataatactatctgtattgccagtttctcaggattattttacataaaatgatatgatatgcggaagtcttttgtaagccatcacatccatagcagtataagatattactactaactagaaagagaaaacaggggtctatgcccagtattaaaattggcattcaggaatctagtgagaatattttttcaggttcattgcttgggcatttctaatttatactcaagaaatgctttcatattgtttggaaattttagtacccttttctctgtaaacagaatttgtagtctacctatgtaacaaaacccacccctgtgccttgcatttcattctccttagcatttattactatcttaacatactagacatgtacttgtcttttgttcatcttttttttttctttttttattagaccataaactttgatggcaggaactttgcctattttatttattattgtattcccagcacctagaacaatcgctggcacatagtagatgctcagtatttgttgaatgaatataaatttttaaatgttataataatattattctgaaatctatgcatacgaagcttttggtacagaaaacatgaaaagagaactactgccttatcatccagtcttcttccctcttctcattcagtctagaacataacctgttttggaaaaagttctcaaaccatatgtttatcttgccctcaaaccataacaacaatcaatgcaaaagacttctgtgacccccagaatatgtggggatttctccacatcagcaagcaagcagttggttttgtagcagacaccaactgggtgtcgtccaattcaattcatcatctacctggagatagtgtcagatcccacagatatcttacttcgatcaaatcacaagtccaggcctccgtgacttccgaagttcccacatccccagcccccagctttgggtttgattaatttcctggagtggctcacagaactcagggaaacatttacttacatttaccagtttataataaaggttattacaaaggatacaggttaagagatgtgtaagaagagatatgggggaaggggtgtggaccttccatgcctttctggggtgccaccttcctctagaaacctccacatgttcagttctccagaacctctctgaacccagtcctcttggtttttagggaagcttcatgacatcagtatttcttctcctagggtatggggcaggaccccctcgtattagggttttaagacccacagtcagaaaggcaggggaagattacagtcctgccttagggcaggtgaaaggaggatgggagaaggtcagagagactcttttctgaggtgtgctcggaaggcctaacacactcaatattataactaaagatgaggacaagggctatgagagttataagccaggaaccatggaaaaaagcctatatgtaataacaccacaatacccatggtaccattcacgtttgttgtttttctgtttttcaattgttctttcagtcttggttcccttaatcttaatttagcaagtaatgccaggtgggataaaattgcccaaacccaacaaagtactgtgtgctgcaggattatttaatgacataccttatgtcccccactagtatttacatttctgggagtacagaaaaattcttgtacatatttcagaaaaaatgaaattaataactatcaaccacttagtgaagtttttacttttttttttgagatggagttttattcttgtcacccaggctggagtgcaatggcgcaatctcagctcactgcaacctccgcctcctgggttcaagtgattctcctgcatcaacctcccaagtagctgggattacaggtgcctggcaccacgactggctaatttttgaatttttagtaaagatggggtttcaccatgttggccaggctagtctcaaactcctgacctcaggtgatctgcccgccttggccccccaaagtgctggattacaggtatgagccaccacacccagactgaagtttttacattttttaaagggcacttattagctgaattaaataaggtaaaaaattgactagtattagagacaagaattggagaatatagttctctagtattcgagaaagtcgttttgataggacaactaatcttagtgagaatttggctttatttcatatttttttaattttttgagatgacgtcttactatgttgccctggctggtctttgaactctgggctcaaacaatcttcctgcctcggcctcccaaagtgctgagattataagcatgagccatctccccaggaatttgactttaaaccatggttctcaaccctttcagattcaacattccctttaataaaaaatataatgtttcataatttcccctttactattataattgaaatgcatagttaacataaactctacctacttacataatttcaaaaatgtcattatgaatgtcctaaatgaaatatatagggggaacataaaaggaatattcatatttcaacatgtaaatgctttggcatgactccattggaaaatataatgaactagtcatgtgcttgcaccttcattaatgtgagttcaaagctacgattgcagactgacacaaatgtgttctattggcaactgatgggtcatgatggtattgccatttgtaatttgatttccaaaatggtaaacaaattgttggtgcagttctcagcaaaacaatgtctataatcttaccttttataagactgttgtattcctagaaaacttagtgtatagtaaaaccattaaaaaattacttagtgtgaatatgttagttggagataaattcttagctcagaccagtgtaagcagaattttttactgtattaatatccagtagaacatttgaaagttgttcagtgcatgagactattctgcattggataggctttctttggctcctttatcatagttataataaaccatgacacctacccctgaaatgccctaattcccttccgtttctttttcttttttctttttagcacttaaaactagctaacttactacaaaatagatttagatttatttcttgttttgttatctgtatcgtttgctcccttctccccaatctatctaaccaactagtataaactagatagtaagattcatgaagatacacttttttatctgattttattcatttgttctattcctattgcctctagagtagtacttggcacatggttagcactaaataagtacctgtcaaatgagtgaagtaatgtgcattgaagacttgaaggggctctgatgctaggaaattgtcatgggataatagatgaggttggtcgtttgtacagaggattcttgttagaagcttactctagtcatgattgtattagaatcttcatttaaaggctcctgaagggtgttggcattagtcagaactgtctcccagaattttatttgtcttgtgatagaataaagcatagttagcctaaagagcagttttcctaatagctcggcatgcccaaagattctaggagttatacaggttgaacatctaatccaaaaatctgaaatgctccaagatacaaaattttttgagcaccaatatgatgccacaagtggaaaattctgatgtgacctcatatgatgagtcacagtcaaaacacagtcaaaactttgtttcatgtacaaaattattaaaaaatattgtataatactacctccaagctatgtgtagaaggtgtatgtgaaacataagtgaattttgtgtttggacttgggacccatccctaagatatctcattatgtatatgcaaatattccaaaaatattttttaaaaaaatccaaattctaaaacacggctggttccaagcgtttcgtaagggatactcaacctgtatagcaaaatgaacatatttacatattctctaggaaatattagtttacaatttttctaggcaaattataattgataaatcataaagaaaatttaaaataacactggtaattttcctacctccttcgttattgttacagaatgctaaagaagaattaattaggtgggaagaaggtaaaaagtggcaagccaaaatagaaggaattcgaaacaagttaaaagagaaagagggggaagtctttactttaacaaagcagttgaatactttgaaggatctttttgccaagtgagtttaaatatcattataaaactaattatgtgtaaaatcctttagtgacctggaaattatatagctttatcatagttgataatatgagaaatggtctagtttaaatgatcatttattatctatgatttacttactttttattttctttaaaatctgttttaaatatattgtaacaattatagatggattttcctgtgatctcgttgtaaattagcttatgacaaatatagggtgttacaattattgtaatttggtttggtaatgagtatgcaattgaaaagccaaacactgaatggtatatttcatgattctatattaaattccacagagccgataaagagaaacttactttgcagaggaaactaaaaacaactggcatgactgttgatcaggttttgggaatacgagctttggagtcagaaaaagaattggaagaattaaaaaagagaaatcttgacttagaaaatgatatattgtatatgaggtaagctattatgtggaaatgtgccacccattgtaatgaaaaactggttgacccctagaaattgaaataataaatgtgtgttgtcttaagcttgggttatgttttcttttcccatgtgaattgagatattcctggttcttcatatgccacataattttggtgtatttttgatcttttgaatattatattgtgagactctggttcttgtttaaattctatgggaaaatgtagatacttttgttttagcatgcaatcggtctaattaggttcaggccacaagttccaacctcatttcttgggctgtggttccatttttcaaagccttttcaatactcttcagatctgtcctgcctgtgtacctcacaataggtgatctggtatgtgagctatgtaccattagttcagttcttagaaactttggtattctgattaggatcgatccatacatttgcagctcaagagtgagcccagaagttcataaacaactttatagggtccctttcttgagctcctccctctttgccatctctctgatactttgtttccctagggatttccatttggggctttagttacccagtgatgccatgtacttcaggaattgcacacttctgcagccaagcaagcaagaggagagtagaaagaggaagaaaaaaacgacttttaccttaccctcttagtatcatagctctaccaattggagatttccctcccaaaaaatattagcttctgtgagttcccattgcagcctctattaccactgctatgggatggcttaagggttggggcatgaaagaacagatagaagaaaaaaaaagtgaggtgttttcatattgtctcttgagtgttaaaagattccctttctctttactcgagctagaattagaaggtttacctggagctctctctgtcagtgcagacacccatcttcaggtttcaaataatgttgtcttcagggcaggcagtaacagaataaaagaaaaggtaaattcatcacctgtttgctgctactttaagtcctggtattctattgtaatctgccttctactcctttgcaaagtcctcaaatggttgctccatgcatttaggagagagaagattgaatgtatttactccattgtacctggaaccagatgcccttgccctgcatcaccccatgtcatttcttagcagagcctttgagatttttgtgtgtgtgtgctttacaatctctttccaagttatatcttctgatacagtcatggtcgtgaaaagcaaaataaaatcatgtgttaacatttaaaactttttaattttattctgacaacagctaaaactatttaatcttctgtttcgctcatttcttccaaggtaaacttcagttggttttacgtgatttgctatttcttcttctttgcatttacaaatgatctgtgatcatattactgatctttgtaaagggctaatatctacctgcaacatttggatatgacagtatttaccctttgtaaatacacattttctatttatcttcaaaaattaccattcattagtctgtgttaatgtctgtttactattgtgtcattatgaatgtgatgtgaacatacgaagttgaacttatttaaacgaacactctcatgagcttctaatccacattccttccttttccttctaagttaccatttcttaaaaatcttttagaagtttccttgatagggaaaacacaaattattgaggaatttttctttctcttgacatctgtttatagttactctcttgttccagcagtggatatttcccctccatgtttttctttgtctaaacatatgttcaaaacaaaacacttttattcttctttgcaggttttacaaggatcaacttttagttttgaaacctgctattacttttagaggccattttttttttctctaataatgtgagttcatgcgggctgaagtaattggaatactttatagaaaagattgaatttgtcttctctctgaactctagtttgaatttctaaattttatgaatcatctagatattaaagaggaggggcatatcaaagaggagaaccctagcagagataagaggcaagagtaaatgtttcatgtatgggtaagagtggatttgtatttacctaagtaaaggtagaccctggacaataaggttggatagatgtggaggtggcaaaccatggagggtcttgtaggtcaagtggatgtttttagacttgaagtgttaaattattatctgaaatcattaagagtctttttagatccttgagcttcttgagaagaccatggatattatgcagttattatataatgttttaaaatagtaagtattttagtttaactgtcttatgtaattccatataaatggatgcatgttctttaaaaatgttaatgtatttcagtaaatcaaaatatactttttgactcatcatttaaaggaggccttcagtgaatgctctgtagaggattattttataatactaattttgatatcctaatttatttgttataaagtttagaaggtttgaagaatttaaaatatagtgttaataaacacactgaacttttctttttttatcttgtatttttatatagtacaacagaaaaaagatgaaatgtgaatagtaaagagtctgtgattgttgttcatagggcccaccaagctcttcctcgagattctgttgtagaagatttacatttacaaaatagatacctccaagaaaaacttcatgctttagaaaaacagttttcaaaggatacatattctaagccttcagtaagtgtatatcttttattatttttttcttttttccatgttaaaatgcatgaaagtgaaatcaacttctttcttaatctggccaaaagcattacatctttctcattaatagtaatacagtaaattcaacttttatttttaacaggtagtgatgtgtaataatttatttaatcctttttaacataataacagtaaacttaagattcttaagcttttcataaagctcataaatgatttctagaaattttaaatatgtagttatcattatgtattttgctgtagcagcagtatacagttaaataaaataggaaaacatgttccaagactgttttcattcaaatatttatgctatatttttagcttataaaaactcattaatcattaatgtaaaattatttgttggattttttaaatatttagtgtattatttttgtttcttttttctttccatgtttcttcattcttccaccttaagcagaatcaggtgtgtgacacaactatgttttctatccttgttaccattattaataaatacaagggcatgatatttttcacaaaagaaacactttgttcagaaccaaaaaagatcatggcaacagtcagaattaaaaatggtaaaagactaggtgccaaagatgacttacataattgggtacctagaaatattctatggtattacagtaatgatgaaaaatacaaattagaacacattttagatcctattgagttaaataaatcagagtcaagaccaaacaataaataaagtcaatttacgtcaacaaatggtaagttggcagattttaactccctttttgaaaatgaaccatgatcctaaggttggtaaaattaatcaagaatgttgtcaaaatgataaagataaaaatgaggaagagaataagataggcaagagtgagaaaggaaagagacacatagctgaaaatgtgagtcacaacaactacatagatccgtagaatctgctatggaggactgtgattatgtgacagttgctgatgccgtggcttagtgagctgagggtgatgcacaggcaggcgatgtaactgatgcgtcagtccagccaagaaaggacgcgtccctggtttggctacgtggccgtcctttatttctttgttaactgaattttcttatagtaagtagcttacgtacatatatagtgcaaatgggaaagtgtgtaagatttagaaaaagcattaactattagtaaactttatcttaagctctaacttttgattagttcctacaaaaattagtgaatatgcattttctaatttagtgctttttttttttttacaattggtgttcacttaatgttatattagataaatgaatagcaaaaataaggtactttagagttgattgttttgccttacaaacttctaatccatccagctgtatttagaagtaagatctcactacagcgaattatatcagtaaaattttgttacagtgttgtgcagtgtcctaagatgtatactaagttccttcagtggctttttttgccatgttttataacagataattttgttataatgagaaaaggaaacttggatgtgttgctgtctatattgtgttaggctcaggcaggatgctgtggcttactcatttaatcactttgggaggcaggggcaggaagattgcttgaggccaagagtttgagatcagcttgggcagcatagccagaccctgtctctacaaaaaatttagacagatgtggtggaacacatttgtagtcctagctattagggaggctgtggtgggaggatcatttgagcccaggagtttgatgttacattgccctattgcactccagactgggcaacagagtgagacctgtctctaaaataataataatgataatgataaatggtgttaggctctgtgcctaagtatatttttcacataggctgggtaaagtggctcatgcctgcaatcccagcactttgggaggccaaggcagcaggagcatttgaggccaggagtcaaagaccagccttgagagaccccatctctaccagaaaaaaaaaaaaaaagaaacaattagctgggtgtgattgtgcacacctgtagtcctagctactcgggaggcagaggtgggcagatcacttgagcccaggagtttgaggttatagtgagctaagattgtgccactgcactccagactgggcaacagagcaagactgtctcaaacaaaaacaaacaaacaaaaagcactttgcagaatatcagtctaactctacagtttatggactttttatgtacgtactacttttggctagcttacattgagatacagaataaaagtttgttcatagcatttatcgtttttttctttatactgtccacctgagatattccagtcacctaagtcatggaaacatcaactaaaattaaatatctatgttaagagaaaatggctgaaagtgatttaattcataacactttttttcacatgctaataaataagagtttgagacttccactaggcattatctctaactcctatccactaagaatttgattttaagtagttgatggcttttaaccggattattcttctgtaagagtttggaagtctcgtgaagttcgttatacaagaattctgtttacaagagagcattacattagaatttgtttttcagaaatttggactatctcaacgaatacctttagttttattatttcaaaatgcaagggaaaaaatgagccataatcactaatagtaactgcatcatattttagtgagaaatgtgttaaaaatatcctcatgtgagatcttccttagatagaattaccctctactctaatatttaatatattttatatctaccaatcagtgatattaataggtgtttatcatttgctgaatcaaataggtacaacagaagacaggaagtttgggagatagaagagctcagggacaggaaatcacagatgtccatatctgaaataaccttaaaagttatcctgtctaatgccttcacttataaactgtagtggtagaatttgcctagtattaacctaatagtggtagatttgaatgtatacttgggctttcttattaagtggaaatgtattcctgtgatttacatatatcaacaaaaatgtttgtcttcttttttttgctacgacatatgtgcatgtgcacacacatctcctcaaacaaaaatcagatggacacatgcagtcattggatctaaaagatgttataaagttgtgtataataggtattttataataatatattttaagacccataatgtcggtggagtaactgactttacagcccatcaagccaatagagagagaaaggagaaaaaaatgaaagttgtgctgaataattaaaaaaaattatttcctatgatgcttataacagtcctatgaggtaggtggtattctaatttatagaaaaaatgcatagaaaaatataattaagcacagttaaaaaaaataaagtttagaatgagaagtaacaacataaataatgacccaatgtagattcaggtcaaaagaaatgaaaatataatattaatggttttcaaagagggaaccattactttagctcaaagaatgaaggagggctttccgaaggagtaaagaattatggcagttcttttgtagcctagtgtattcatttgctaaggtggctgtaacagactactacagatttggtggcttaaacaatagaaatttatggtcttagttctggagacctagaagtccaaaatcaagacatcagcagggttgatttcctctgcacaatcagagggaaagatctttcccaatcctctctccttggcttataaatgtccatgttttccctgtttctttttatcatcttccttctgtacatgtctctgtgtctaaatccccaaattttctcttttcataaggataccagtcacagtcgaatagggtttaccctgaaatctcattttaacttgaatacctctgtaaagacccagtctccaaataaagtcacattctgaggtactggaaattatgactttaatatataaatgtggagggtaaggggaacacagttcaacccataacggttagataacaatcgtgctttattttggactagtaaaaccaccatagatcagtttaaccattatgaaattatacatgaaggcattatatgtatggacattattaagtcatacttgctttgcttccattgtaattaaaacaaaccatactacctttgttctgcaagttttgtattctaacttatttatttttggctttcaccagaacactccgattttctcatattcctttgaggaaaaaaagttaccttttgacagtattttcttatccagtatgtcttttatggcttttatttattaaactttaaaaatattcctaatttcatttccctgaagatttcaggaatagagtcagatgatcattgtcagagagaacaggagcttcagaaggaaaacttgaagttgtcatctgaaaatattgaactgaaatttcagcttgaacaagcaaataaagatttgccaagattaaaggtgaatttaatgttttttattaggaaatctaatgcctaaaactccttccttagttgttatgtttacttttattagcttattaagaagtcaaaaatgcatattcctaatatatcatggtgatggtatactttatacatttgctctttagcatttatttgttgaaggcctactttatattaaacactcctccagatgctgggaaacagcagtcaaaaaattccttatactcataggacttacgttctagtggagaagactgacaataaacaagtcactaaatagtatgtcatctgatgttagtgctaaggagagaaataaagcatgattggtgtaaagagtatggggagagagaaggggtgtaactgaaaatagagtagtaagggaggtcttccttaataagatgatatatgaacagagagctaaggaggggtaaaggaagtgagtcatacagatactagaaaaataattacagacaacagaaatagcaagttcagatgtcctaaggtgggaggatgcgtggtatatttcattaaaaattatcacactgtaaaatataagaataatttgtttcttttagaaattttactttattctgatattaataatgattttttaatctttggttttccaagtcttaccctatttatgggaatcttttttttcttttggctagctaattgcttcagttttgttttctaatctagaatgttagcaatctgttaattccactggtaatgatatagttaagctatgtcttgcttctcacactttatttatttatttactcagggcactaatctgccattttttcgcactttttttccttttttttttttttggtactgcttcttattctggtttttacattgatagaaccaatgttagacgttcatttgccttttgctgtgtatatttgggtaaggatctatatgtgcaatatatgggacagttaaaatcagaattctaaatttgtattattgcatcaggcaataatgtgggaaataccttgacatttcatatacacaatattcttgtattaatttaacgtcttagttcaaaatcttccttgttaatatagagaccctattatttggtttggcaatacagttgaagagattgatggttcttatgaattgtttgccttttcttttcaatggctgtagctatgttaaattattacatgtttgcttgttatctttcagaatcaagtcagagatttgaaggaaatgtgtgaatttcttaagaaagaaaaagcagaagttcagcggaaacttggccatgttagaggggtatgtgagaatttaccatacatttgttttggtttcagcagtgataagccagaaatgaaaagtttagatatgttgtaaaagtactgatatgcctctacaagtgccctgtagtttcagtgtttattctgcatctgtaatataaaacagtaagcatttctatgtgtctcaaagtattttatcatctgttataccttacatactttcatctctctttttattgaatatgcctccataccttgaaaacatttaacttccaggaatccttttgtttatggaggtaactgctaactggtccttggtccaatgctgccattttgtaaccatttgttatgatatcttcccagcttggtataatgttttataattacattgttcctccccctctttttttgtgttcttgtaattttctccctatgttattttgtattcattttatataatgaataaatgttgcttatgaggtcaaggccaaagacttaagctcctgttgatttcatgttgctgagtgtcataaatggaagcaatcataatgcagagtcattctggtagtaatattaaatatatgatggattcagtgaaaatattatgtgttattagaaaaatattcagaacaggccgggggcagtggctcacacctgtaatcccagcaatttgggaggccgaggcgggcagatcactggaagtcaggagttcaagaccagcctggccgacatggtgaaaccccatctctactaaaaatatgaaaattagctgggcatggtggctcatgcctgtaatcctagctactcaggaggttgaggcaggagaattgcttgaacctggcaggcggaggttacagtgagccatggtcacacaactgtactccagcctgggcgacagagcgagactccatcttttaaaacaaaaaaaaaaaaggaaaaatattcagaacagtatcttgctggcagcaacatttgtttcatcaatgaaaatatgtgttaatttgaccttttctatctaagttaattatgaaagtgcatactaaaatgatgtaaaagtttatatttcaggattattcttattcatggatgattaactaaaatgcaaaaagaaattaagcatactgtttggctaaactgttaaaaattatttttattttaaatgataagcagttaaacttattaagtgatgactcatctctgctgatatatttatgcaaggttttttatttcagataactcttctatttatattaaacagaaactgtatttctaagcaatagcatttcttagagaaaattgcctctattatgttgcaattaaaatttaattactcatgagctctttaaagacacaatttctcttgtgtggttttatttcatataaagaaaaactctgatatactggagagaacattagctaaatagactatttagacttaatcattttgatcagacatcaaggctagactatttaagctgttacttattagctgcatgattttaggaatgtcaaatttcctaagtcttggttttcttgtatttaaaatggaaattataattcctatctcatagaattgttttaaggatgaattgaattaatacagttttgacttcaaatattaggaattattgagtataataagcctgttgtattgttggtacttcgtattatacttactaaaatatttgattaaagatttaacatattctttcgtagtctggtagaagtggaaagacaatcccagaactggaaaaaaccattggtttaatgaaaaaagtagttgaaaaagtccagagagaaaatgaacagttgaaaaaagcatcaggaatattgactagtgaaaaaatggctaatattgagcaggaaaatgaaaaattgaaggtaattttttttaatgtgatcatttttaggggaatattttacgttttgttactatttaggaaaatttcaaatatgctcattactatataaaatggctttaatgaatacaatacatattttataaatatagaaaaaaacttatgagaggcaaggctaagggttatagagtaggtctacctgatctttcttgttatttcaagaccaatacttttcacttttctctctgacagcatagattaattacctgtgtctctcttttttttttcttttgagatggagtactgctttgtcacccaggctggaatgcagtggtgcaatcttgactcactgcaagctctgcctcccgggttcatgccattctcctgcctcagcctcccccagtagctgggactacaggtgcccaccaccacgcctggctaacttttcgtatttttagtagagatggggtttcaccatgttaaccaggactgtctcgatctcctgacctcgtgatccgcccactgcggcctctgtgtctctttgtgaaaatacagatgcccaagctcccatccctgaaattgatttaattattttagggtgggtcctgacacagatatgtatgttgttgttattttaagtcatcaatttattctaatatgtagccaacgttgggaacttcgttctcactaatattcaaatgaagactttaattctaatcatatcaaatatggtttctaaaactactttgaagatttatgagtttataagattatcttttatttccttgttttgataatgtatactttttattttgtttgtttttttactaggctgaattagaaaaacttaaagctcatcttgggcatcagttgagcatgcactatgaatccaagaccaaaggcacagaaaaaattattgctgaaaatgaaaggcttcgtaaagaacttaaaaaagtatgacttttatgactgattataacttttgatttttattttacttaatacctcttggaaaaactggaagtagatccttgatgagagtgtctgtaaaggtagatattaagagattgaggaattgtgtttctatgcctgctgtcatcacattccaccatgaaaaacattgataataaaagttaatacatttaggctgggcacggtggctcacgcctgtaatcccagcactttgggaggccaaggcgggtggatcacgaggtcaggagatcgagaccatcctggctaacacggtgaaaccccgtctctactaaaaatacaaaaaattagccgggcgtggtggcgggcgcctgtagtcccagctactcgggaagctgaggcaggagaatcgcttgaacccgggaggcagaggttgcagtgagccgagatcgcaccactacactccagcctgggcaacagagcgagactccatctcaaacaaacaaaaaaaagaaatgatctacgttgcttacacataccttatgcttatagctaggtctcgtaagcattaggaagtcaaaacaaagaatcttttacatgtgtaaaggtataaactatcccatttttctaaaaatatagaggaacaaagtgtcaaatttaaagtaatcactagtaactaaatatattcctctgacctcattttcgtgatctgttgttctaattattattggccatattgctgctttaaaggagagatgttgaatttgttgaaattttaatcagcatttagagccccaggttatttttgttttccaatttgtaatgataattttgaatacactgaatctatgagaacagtattatgttttctcataaaatactaattagcatttaatgataggaaactgatgctgcagagaaattacggatagcaaagaataatttagagatattaaatgagaagatgacagttcaactagaagagactggtaagagattgcagtttgcagaaagcagaggtccacagcttgaaggtgctgacagtaagagctggaaatccattgtggttacaaggtaggaacagagttttaaacttgtacaaagtttaatcatttcaaattttggcattgttttaaaagacaacactattctggataacctggtttcttcctgatgaacagtttgtttggttgttgttttaacataatactttttttctgttgtagtattgttggagactttttcttccttgaaatgtttaacttgtttaaccttgtttgggtggcagggcatggaacagtgtagagctggggctgggcgaaggagttggagctgtgtgtgcgtcatgaagctgtcatcagctatgagcctgggctgaggctgctcagcttctcctgggtgctatttttctccaactgcagcttcagcttcttgattgtataatttgcttcctcaagtatgagccaggaataattgagctgtcttgtcacaatgtgtggcatactggatctaggctgtgctgcaatgcttttagagttatatcctgggcaactttctcttcagatagccccaagagatgaattcagcaccagctttgatgttttactagcttctgctttctggtacttgattttctcccaccccgaacacatgggattccaacctgtgaaactaatttttgtggctatgaaagaggtagtggtagtttatgagtaaacattcagtctgttgccactatcatcatgtgtggttcatcatgactgtgatgagtaggtaaaaggctctttgtgtcattctcatttccaattttaagcagctgcttcaaggagtctggaagtcattgaccagtgggatcctgcctgtgtcttttcccattaaagccatcctgtatgaagtggtatcctttaccatctagcacatctgccgcccccatttcaaaaggcatactcatctttatctcaacattctcatacagttccttatgtccatgcacctccaatgtcccctttgatgtctttgaggttttcatcttccatgtctgctatttggaatggtcttgatgggaggcaagatagtgatcactacaactaggatgggagtcttagtaccgtgaggctacagcaagtcccacagagggcctgctgcactgtacttgcctctgtcaaccaagtctaaggagaaagattaagcaggcatattaaaggacagcccagatggacatgaagtcctggaggaggccttggttcctgtcctaatactaaacctagagtacccagaatccacacttctccactctagctctcacttttcccatctacacactgggaaaaattattctgtcagaaagccagtgtcaaggtgagaacaaataacaaatgtgatgatatggagtgggagaaggggtctcttctactgtcttattggaccctagcagtggctctgagccagcagtcctgtcagttgatttcttggtcgttcctttgttttcttctataatcacatgtggactcagaatgaattttgagttactctgaaatctatttattcaacagatatttacttagtacctcctattgccagactctgctttatgttggatattattttttaaaagcccaccttgcctagatttcctcaaaggaccaggtggcttccctggttttgaaagaccctaattcttactatgatcttaagtaaattatatcctttctgtgggctcaagttctttctaagagggctctttggggctacaaaagaaattgttagtgcaaaaagagtttataaggtttataaatggttagtagaggtgatgatgatatttaaccataattgaagatgactttgcattttagatcatatacgtgtttttcgtctgagaacgatacaggtcactgagcataccataagccttcagtaaatcatttgcagaagacattgcagaagacataagtctaagtagaaatctcttgacagagagaaggctcgttttgatccttgacctcaaatttaggttccctaaatccattaaaaaagagaaagaaaaagaaaaaaagttactaaagtttaaatctgggaggattatatacccttctcaataaagcagtttagagagatctcttttgggacccatgacacaggtcttgctcatgctgacatctttatagttgctttattatttattcaacaaacttagtaacacgtattctatgtcaggccttttcctgactactgggacaaaccagggtgatgtgggggctgttttagatagggtgatcagaggaggcctctctgtttgggtggcttttgaatagaaaattagatgaagtgaaggagtaagcttctgatatttcactgtttacttgtggtagatctgtgataatctctgtcaggttaaaaacattcccttctaatctaagtttctaagatctatcaaaagctgtttgaatatatttagacaatcataattttcctttcttgtattatcctagcagattttgttgccaaagctatactggccattttaacttagaatgcagtctttctattcatttctctggaaaagtttggatattgtaagcattatttttctttaggtatgatgaacctgcagaactgtttggttcaattatgaattttttttttctggagtctgtatttttttgaactattaatcatttctttaatgattataaatctattcagatttttacaagctttatccctctcccatcatacactatttttcttacccatgcttttgcacaattttttcctctcccttagtgttttcctacctagatacctcctatgtgtgtctgtgtatgtgagaaaagctttttatttgccatctttatatttctaagaatatctagtaatacagaattttatattctgaagaattttactttgcattttcttattttgtgattgaaaaaaggtattaattttaaaatggtcaaatcaggctccatccttggaaaatacccaaatcctttattttgattgggccatctgttaattagggataccttatctcttgccaccactttttaatgctaaataaatatgtagctaaaactttgactagaagaaacagtaaaataagatattcttgcttatttttagtacagttatttgaactgacttttaaatcagtgacataaattatttgccatgtctatactttttttccttatacttttagaatgtatgaaaccaagttaaaagaattggaaactgatattgccaaaaaaaatcaaagcattactgaccttaaacagcttgtaaaagaagcaacagagagagaacaaaaagttaacaaatacaatgaagaccttgaacaacaggtaagtaacgtaatttttctttacatgataaaataatgcataatatcgcaagatgttccttgcattgtcttatatagataaaaatggactctattaagaagacccatctaactgaagggcaccccattcacccatttgcttaagccagaaactttggatcatcaacgacttcattcttttcattctccacattttctatcattaaatcatgtcagctctattttcaaactatatcctaaatatgaccacttcttggtatcttgagacatcactaccagtcttgtccaagctattgttttatacctgaataactgcaataatttccaagctggtatctcagcttccactcttggattatttcaccctatttctatttctgggctgtctccacacagttgccaggtaacccttttaaaacataaagcacatcacaaagcacaaagtcctatcctcagaatcttccagtggttctccatcaccctaaaataaaacttaaaagttcttttcatatcccaaaacaacatatgaggtctggcacccagttttcttcccaatctcatcttctactacttttcccttcatttcattcacaatgttttaaccacagtaaccttctttcagtactttaaacaatccaaactcgtttaagcgtcaagtccttatacttgtttcctttgtttagaatactgttcacccaaatattctcatagcttgctcccagacttcatgtctctgctgaaatagaggctccttagagagaccttccctaaccctaaccctaaccctatactacttgccatcactctttatcctcttaccctggattattttttcttgatagctcttcctaccatctggcactatattacatcatatcatattaaacacacattctttgtgcttccccactaaacaaggaccatgcaagatggaacattgccattttgttcactgctgttagcctctgtgcctaggacaatgccagttatgcagtagttactcaatacttgttgaatgaatggtgaatagaacatagaaatttgcctatgcgtgcttttgaaaaccatattttaatattacgctttgttaaaaatgtgtatctttataaatcctcatatttccatggcaaaccttatcttctaacttttcattgtcctcaaagattaagattcttaaacatgttcctgaaggtgctgagacagagcaaggccttaaacgggagcttcaagttcttaggtacatcatgtattcatatgactactttgtttttttctttaaaaaaaaaattattagtttttatatactccgaattgctacaactagagacaagcatttttcgactttactgcctaacaggcttattaggtccttatttcttccctctaatgctaatcactctttttcataatacacactagaaaaaaaggataaacccaactctaagtttccagtttgtaatttagtttaaacttttctaagagcatagaatgagttaaaccttagcttcccagaggaaaatactaatgaaagagaacaagtaatttttttactttcaggggtctctgtagcctgctttcattaagctcctcttataacgaaaccacacttgcaaatgccatcaggtcagatattaagaaaaacgtgaaggcttttgtattccaggctttttgtttgagaatggtgacattgtagcattgagagtaaatgtttacttcgataaaggctagcttgttctgattactgtacatcactagttcataagaaatgcccatatattttatgaagcaatatctgctttatttttttaacacattatcattgtgttctagattagctaatcatcagctggataaagagaaagcagaattaatccatcagatagaagctaacaaggaccaaagtggagctgaaagcaccatacctggtaatgtattttaaaaaacatgttagctacccccaagtttttgaatttgggtttgccttttttttttttttttggctcagatttctgatcattgtctccctgtaaaatcgaattcctgataagctttgggtcttttgtctctctgtgctattaatataaaaatattcccatttttctctttgtgttgtttatactatagagtagcaagtacccaagtgttcttctctttgttctccatctgggtgttacagatttaatcacaatacagtgctaagcaatgaatactaaatctgttgcttccagtttctaagtataggctctttcaagtcctctgaacatttttaaaaactgcaaataagtaaatactgcctatatttttttccgtttacaaagtaaaaagaaaatctttctgctcccttccattcccattcaaaagtgattactaatcattcctcattcctgcatatacatacacacatattttgtatacatatatatcacacatatgcatacatgtgtttgtatgttcatatgtacaatgtacatatcctcattatttgtggattctgtattttctaaatcacctcctcactaaagtgtgtatgtaatcccaaatcaacactcgcagcacatttgcaaacatccacagagccttggaaagtttgaataatccaacctacatgtccccagcagaagtccaacaaggcagtgctcagtatcctcatttcagttttcatagagaaatgagcagaggatggagacagtagagggcagcacagcatagtgcaagaagctgtggctctggggcctggtggaagggatttgaatcccaattctgaggcttgttactgctctagccttaggagagtcatgtaacacttctgaatcttgttttcttatgtaaataaatagaatttaccaggatgagttatctttaggatttaagattatcatctgtgtgagatatgtaggtgtatgtatatatatgcgtgtatgtatatatatgcgtgtatgtatatatatgcatgtctgtacatatttcccgtagcagcagtggtttgatattcactaattgggctaactttatagaccaaaactactatggatagagaatactttgtttgcatttacgtatatatattttcttggcaagtaacataaaattgaactaatactatacacatttctagcatatttgcctttaacagtttatcatggacatcttttgaggtctgttcataaattatctcatccatttaataattccatagtgtattattgcatgtataagcacatcgaaccatttatgttttgatggatatttagtttgcttccaagtttctgcttctataaaatatgattaatctattgacctaattatgccattgtgataggatgatagagatgccattctctccaaaggattataccaatttatatctgaactatctttgactatctcttgtagctttttcagtatgctatgtagtcctattactaatttgtaataaaagccatcatgtgtgagttgtactagacactatgctaattgccttacaagcattctatatttacaaccatatatgataggtattactgtctccattttatgtgataaacaaattcaaagtggttaagtaaccattccctaagccagctaggaaatagaggcaggattaaaatctaaatgtatgaaactccacagctccttggcattcctagtccttaacccgctatgctatgctacgtcttggtaactaaaagtacatattaaatactctcaaaatatgtctcatagcagccagcttggtatgtacactagacacagtattaatgctgttgatgtgaggaaaattttataattttccttccatccatatactaaccaggcccaacagtgcttagcttctgagatcagagatcaggtgcatgtgcattaagggtcatatggccatagatagttctctaatctttccattcctcagtttcttaagggaatttctgaaccctcaaaattccttatttcctaagtagacagattacctgtcatttttcaaagattaaggcttaagatcaaaccagaactgttttggaaattctaaatcactgtctatataaatggcaagataacttttaagatatttataccaagcccagtacagtagcacaccacacctgtaatcccagcactttgggaggctgaagtgggtggatcacatgaggtcaggagttcgagaccactctggccaacatggtgaaaccctgtctctactaaaaatataaaaattagccaggcatggtggcacttgcctgttatcccagctacaagggaggctaaggcaggagaatcgctttaacctgggaggcagtggttgttgcagtgagccaagattgcaccactgcactctagcctgggcgacagagtgagactgtctcaaaaaaaaaaaaaaaaaaaaagatacttgtcccagccatgaaaatgtttgctgccccttactttcgcaaacttttagtattttattatttttcaatggctgtaaaatatgacttattaaatgtagtataatataaagaaaagagatatctagcaaagatagcattaaagcaaaaatcctatttgcctgctgataaagttagaggtgttaacttggagggtgaatccaataaattagaacttttgtgctatatttggagacttttgttttcctaccaaagtatcagggctatgtcttacttatctttgtattacacagcctgcatgacacgttttgcacatagtaattgcacagtaaatgtgtaataacctacatggaatagccagtgttgtgttggatagcgggagcatttggctagcttatggttatagtcccttacccaacagtctgcttttcttctgttgtacttttagtacctaacaagtttccctggctttaggattttttccatgtaaaatttctatcatgtgaagaaaaaataacttggcctacacttctaatacctagcacatacctctttctgcctgctatgaaattataatacttgatggagggaggcagcattaagtgtttacatcctgaagtatttcagccataacatccagtgttttccaggttctaggtttcataaaatgtatctctgttctctagaacaaatccattaccttgaactcattcgtagtgggaaaaagctgagtctaatttgtatgactttttcaacagatgctgatcaactaaaggaaaaaataaaagatctagagacacagctcaaaatgtcagatctagaaaagcagcatttgaaggtaatatttaattatattttagtatcgttttgtgaaaacagctgttgaaaactattttcattaccatctttaactacgtatcctaaaaaattcagtaataacatcttatatttgacctttatattgcaaagttaattatgttcatctgactattcctaacatattagagttaacaaaaaattcagactcaacataggattaagtagtaaatttattttttaattgtaacaaatatatgccattagtatgttcttaagttttgggtcacattggcaacagtgtctttattttttttttgaaattcttttcaggaatcctaaggttatagttcccttaaaaaaatatttgctgttttacctcttttaagactgtaaacaggacaaaaaggcatggatatgagaattagctagtgatcactggctattctaaatagtcactaaggcttgaattgtctcttcaccagatgcctgtcagaagtcccaaaggtttccctgatcatattaataactttataaaaaattgatcattattcattaaatattagatattagtaaggaaaatataaatgaagtctaaaccaaaactcttaaccagactaacttcaatgttatgaatcacaaaatctttttgattgattgctctattgacaagctcttatatgcttttagagaaagattaagtcccattataagagatgataaattttagtcaaagactagaacacaacttacagaatacataactggacttgacagttaacaacttagttatttacactgtacaatggaacaaagaaaaatcttaattcttctgcctttattgctgtatttgaccattcaggaatactttggctttcatatttacaattaaatctccttgttcaaacgtaaaatatgtatatttcctatatgcaacttttaaagataatgtttccattaggaggaaataaagaagctgaaaaaagaactggaaaattttgatccttcattttttgaagaaattgaagatcttaagtataattacaaggaagaagtgaagaagaatattctcttagaagagaaggtaaaaaaactttcagaacaattgggagttgaattaactagccctgttgctgcttctgaagagtttgaagatgaagaagaaagtcctgttaatttccccatttactaaaggtcacctataaactttgtttcatttaactatttattaactttataagttaaatatacttggaaataagcagttctccgaactgtagtatttccttctcactaccttgtacctttatacttagattggaattcttaataaataaaattatatgaaattttcaactta

SEQ ID NO: 9 - DNA, 188641 bp, Homo sapiens
  source 1..188641: mol_type = genomic DNA; note = CFTR_gene
gtagtaggtctttggcattaggagcttgagcccagacggccctagcagggaccccagcgcccgagagaccatgcagaggtcgcctctggaaaaggccagcgttgtctccaaactttttttcaggtgagaaggtggccaaccgagcttcggaaagacacgtgcccacgaaagaggagggcgtgtgtatgggttgggtttggggtaaaggaataagcagtttttaaaaagatgcgctatcattcattgttttgaaagaaaatgtgggtattgtagaataaaacagaaagcattaagaagagatggaagaatgaactgaagctgattgaatagagagccacatctacttgcaactgaaaagttagaatctcaagactcaagtacgctactatgcacttgttttatttcatttttctaagaaactaaaaatacttgttaataagtacctaagtatggtttattggttttcccccttcatgccttggacacttgattgtcttcttggcacatacaggtgccatgcctgcatatagtaagtgctcagaaaacatttcttgactgaattcagccaacaaaaattttggggtaggtagaaaatatatgcttaaagtatttattgttatgagactggatatatctagtatttgtcacaggtaaatgattcttcaaaaattgaaagcaaatttgttgaaatatttattttgaaaaaagttacttcacaagctataaattttaaaagccataggaatagataccgaagttatatccaactgacatttaataaattgtattcatagcctaatgtgatgagccacagaagcttgcaaactttaatgagattttttaaaatagcatctaagttcggaatcttaggcaaagtgttgttagatgtagcacttcatatttgaagtgttctttggatattgcatctactttgttcctgttattatactggtgtgaatgaatgaataggtactgctctctcttgggacattacttgacacataattacccaatgaataagcatactgaggtatcaaaaaagtcaaatatgttataaatagctcatatatgtgtgtaggggggaaggaatttagctttcacatctctcttatgtttagttctctgcatgtgcagttaatcctggaactccggtgctaaggagagactgttggcccttgaaggagagctcctccctgtggatgagagagaaggactttactctttggaattatctttttgtgttgatgttatccaccttttgttactccacctataaaatcggcttatctattgatctgttttcctagtccttataaagtcaaaatgttaattggcataaattatagactttttttagcagagaactttgaggaacctaaatgccaaccagtctaaaaatgcagttttcagaagaatgaatatttcatggatagttctaaatactaatgaactttaaaatagcttactattgatctgtcaaagtgggtttttatataattttctttttacaaatcacctgacacatttaatataggttaaaaaatgctatcaggctggtttgcaaagaaaatgtattacaaaggctgctaagtgtgttaagagcatactcatttctgttctccaaaatatttcataaggtgctttaagaataggtatgtttttaaaagttaagttcctactatttataggaactgacaatcacctaaaataccaatgattacaaacttccttctggccttctggactgcaattctaaaagtgtaaaaaacatattttctgcattaagttaggcagtattgcttagttttcaaagtggtaggctttggagtcagattattttgattcagatcctacatctactgtttagtagctctgttgcctgaggcaggtcccttaacatctctgtgtgtgacttgacctttaaaatttggagactgtcataggggttaatcccttgagaaaatgaatgtgaaaagttagcctaatgttaactgctattattatggattaccatattttcacattcatcacagtacatgcaccttgttaatataagatgctcaattcatctttgagtataattttgtgactctcaatctggatatgcaatgagtgggcctgtatgagaatttaatttatgaaaaattgtgtttcacatggccttaccagatatacaggaaacacgtcacatgtttctattgtatgttgttaaatgccttagaatttaactttctgaataggatcccttcagtttgagagtcataaaagagtaaaattattatggtatgagttatagattgtattgaatatctctttatatgtctaggttttgtcattggaaaaccaaaaagtttggaaaaaaaatctaagttatttcttactttcttaattttgtgtggatttcacatcaagtataaaatttgaagaacatctgaactatcataatccatatatatatataaaataaacataatctaagagagaatttcaccatgaaaaattcaggtagttcatgactatcagagcaaacaagtacattaaattgaaacttttatgaaaataacatttatgaaataggaagctatttttaaactagaagtgatatattagcatataatttataattcatatacaagtgggattgatttataaatggtcaccaacagagattgtgctatttaatttgggaaaattttttaaatttacattttctcacaacttttaaggtagttattcagtttgttcctctctgtctcttctctcatgccctgaatttttcatatttcgtttagttgtaagagtgtatatcaaaccgtgtgtcacatgacataacttgaattttcgtcgtgatatctgtgctatgtctaggtctatactgaggaactgtgggaaccccacagaatccaagtatacagtgccactgatttcttacaagggatgtggggtctcctgtaaactctgcagttagtctcaagtaagaccaaagagtaaaatattgttaggatctaaggtggaaattcagcaaagaatcacatagtctaagtctcgagtttaacagtaagataatttgagatacttttgtaattattaaacacaaagtaatgagagattttaaaacaaacaaatacacctgaatttatatatcagaataggtatggtggttcaaaatagctatctaataaaaaccacactcctattctaaacatttgcctttgatcaaaataattttgggtctcttattatgaaattgcctttctaaataatacataaatttcttctcataagtatatattagccacattattttattgttattgttttatattcatagcttgctttagattaaaaattatattacccagactggtctcttggacttgcttccaagtgacttttgactgtatcacaaaatcaaattcactctgaaaatataaagatttttcatcataatttcctttgttaacagccaagtgctacctaattttaggtgttttcattaaaaaaaaatgcattgcaaactttaaagacaattcttttgtttgtttgtttttaaaagacagagtctcactctgttgcccaggctagagtgcagtgacacaatcataactcactgcaacctccacctcctgggctcaagtgagccttccatcttgcctcacgagtagctgggtcttcaggtgtacaggtgtgtaccaccatgcctggctaactttttttttttttaagttatatagagacagtatctcactatgttgcccaggctgctcttggagctcctggcctcaagttatcctcccactcagtctcccaaagtgctgggattacaggcgtaagccacctcaccctgtcagcctaaagacagtgcttaatgaagagaaatataagtgctttgagcaatggaagtataattaaaattatactatgaaagatttataaagatgaccattttgaatgggaccacacttatttggttatataaattatgatacactattaaaaattcatcatgatgattttgtatttacattttatttacatgtttgcaatttgtgaggaaagctaaaattatggctaagccataaatatttttgcagtttgttgagggtgtttgtaaaagtgttgccaaggaagaccagttggctacccaaacaagggtttagtctaggtctgatcaatacatacacattatctcaggtttgtctatcagaaaaaccttaggttatccaaatcaaaataaaatagatgcataaaacaaaggccaatatgtgttgaacaattatattgtgatatacaactgccaagcattcccgattaccatgactccatttagtcagtccatgggcaaatgccatcaatgaggacagcccagggtttccatattctctcttggctttacatcctataggaattggaggggcccacctctgggataggagcccttctgtcttgaacaatgttgtctgaacactaacaaatgttgactttctacaccagtccctcaatagtcttttctatttatccttttgctgaccatgttttgttattacacagttgagatttttcagctgggaatctgtgttaattttgtattaattttgattagcttaactctcagagttctaaaagtacctcctgtacctgatatatgacaaaaattataattacatttatttatatataaaatatctttgtatatgtaaaatatctttgtatatataattatataattgtttcttttaattttgcaaattttaaaaagttctcctttgttttgaagtttattcctatagttttttatatgctagttaaattattaatcacttgattcaagtaatattcttatatacttataaggaatagtgtagttttaatatttaattccttgctaaagagagaagtggaatctatttttcttagctacttcatcaatattttatgtttgatgtgacagtcaaaatatccctcagagctaactgttacactagggaaatcacggttttccagttttccatttatgtgttatgggagggagtggaacttagtgtaataatattcaatacataaatgttaacacttgtttaaaggtccttgagtgagtactgctataaaatgcattattattgctagtgtcatttcacaagagcctataatttcagtgtgatagagctacaatataagtatagtattgcaaaaccatcaggaagggtgttaactatttagcatgcagttatgtgttggttgtcaaaacgttaaaaacatctctgactcagcagcaattttggcaattttgatcctgaggcatctgtgtagggcatcttcctggagaaaaacctctgagatgcaatgaggtcaaaaggggaaaacagactatgataaagatcaagttgtttggagatcttgtagaaagattaatttacaaatatgtcaagtgcattatcatggaggaaaacattgctatttctgttggttctcttcagagctctagaatcaatttaccacatagttgtttcagtgtgaaattagcattacagagtggctttacggctttactgtagggcattgtgtcagcaaagagcttaggcttcttttagcaagaagcttgtaaaaatttaatttactcttagattgcttgatgtagagaattacattcctacagagctctgaaaaatcttttttcagagtttttcacagctgtattcaagttgcaaggcttgtcaactttgctatttttctgtgcagctctgttaacttattattatcttttgacataaattatgattccaaattgtaaagctctggatgtcagggccttttctaatttgtttagtatgatattcagaccatttcaagactcttccgtggaacaatttaataaagatttttttgtgatgttaatgagttcatggtgatcaaccctagagacctgtgtctattgtagatcgatgacattcaacagtcctgcagtgctggcatcattttgataaaaaggggtcaaagcaagtgggactgtgggcagatttttaatgcttagaacaattattccatcgaagttttcttgtgtcccttctgccttagcctttgtaggatagcatgcttgctaatttcttgctcatggggtaaggaaatgaagatttttgctaggtccgtaggattattaggactactcaggcctgaagctatgcctggatatagccagaaaactctcccatagcttgctccaaggagctgagatacagcagtacttcctttgtaggtcatgattctgggtaacctggaagatgacctcattcatattctgtattctatgtgagacgttaagaaggtagaggtggccaagaaggaaattgttgctgcctttatggaacaaattatctgaaacccagctttctcgagggcttcattgaagtactcaactggggcacttaacccagtctaaggctggtcaaggaaggcttgctgggggaagtgtcttttgtattcacacctaaaggaggttattcaattagaattatccaaagagggtagggatgggctaggaaaaatttaaacaggtagtgtggaggactgacaggataagtaagcatggcaccttcaaaatatcctgagaagttccctatgacgggaacataaaatatgtgacagagatttgtgggagatgggtctggaaactctagcaggggccagatcgtaagggggctttgtaggctttgtaggctttgtttgggctttatcatactggaagtgaaaagccatggcttttaaacaggagagggacataatcagttcatatactgttgcagttttgtaaaagaaaagatgagctgaaagagtggccatggtggaggtgggtggggtgggggggagggggcggggagagagagagagagagagagatttgaaagacatttaggaggtaaaatcaactggtttggtaatcaattagtagttgaaggtgaaggaaagagaagagttaaggataacatctatatttgttgatttggataatagaggggacagtggtgctgcttattgaatgagaaaatttaatcggagaagaaggcatggagcaggagtgcagacctatgtgactctacttctctcaaaaccagaaacggaaatgatgtatatggctcagggttaggtaatatggttatttgaaaatgtattaaagtgatttagagcttagtcttaggtaagagatataagatgtctgaggtgacagttttataaatatgtagagtgcccacttgtttggccttattgtggcatagtgtgacctgagagtgttaggaagaagcagctgagttctagggacagtactggttaaattctacttagaaattatacttagaactctcctatataacctgctaactgatgtctgaacctcctgataacttcactcctttaggcagtgcttttcacatcacgggacacaacatatgagagatcatagaaattcaatgtggtatgaaaatctgcttgggacttcagatattgtctccagtgattgaataaaaataggagctcacctactatgatgaggtttctgtgtgtgttaaaagaaggttttcattacttttgaaaaggttatgtatccttgttttatgttaaaactttgagctttgttaaatatgcagagttctctttcttagcatggactacagaggtgcaactacctcctacctgacttcacatctactcccaaatgcctagtgaaggcttaataatttcaaaaagggactctagaatttcatttgataccagtcagacaaatgtgtgaaaattaagcataataggcagaatcccaggggtactgacagctgtattaagaggtgattcaagggctaaaccttagagtccagcattggttatgggtgtgacaagaaaatgaagcctatgttggctgggattagcaaccacagttctagaggaagcaaggtggagaaactatatagggggctccctttgtacgttttatttattttaaacatctctataaactctagaaattaaaacaacaataccaacacaaaagcatcactttttcgaccaaagaccattgctatacttttttgtgtaaagggctagatagtaaatattttcagctttgtgggccacataagtctctgcaatagacaatatgcaaacaaataagcatggctgtgtttcaattaaactttattatgaacattaaaatttgaatttcatataacttttacatgttgcaaaatattctttatttaaattctattgcaatatgctttaaaagatacagtttttagtctttcttagtttaaaataaaatctagaaaaaattttaagtcttctataactttttttcggtaactgaataattttaaaagtaagtgaaacatttagacatgcaaaatggacttttcagaagaagaaaatggtagcttaacagttattagattattgtccagaataatttttgacttataagtctctgttgaccatttcattgcctctttttttggaatatgcatcttttaatgtgtccttcaaggcaaaggctctatcttatctatcttgtgtcttgcattttcccagggcaatgtttttcacaatttttttaaaaaacaatactgtaatcaattttcaaataaaattttccatgggaccgcagtgtatacaaatagcagtgacaataaaagataataactctcccataaatacaaagaaacagttaacctagtgctctaaagtaaaggctacagtgattttgtataacatttatatgtaattttcttgatcctacatggttgtgtttttcacagtgttatgtttctgaaatcgagatgccttttataattgatgtcaaaagaaacttgtcagccacaaggcccaggaataagttgtaatatgggaacttagcaatacataaaggtatatatactcctgtgacctcagctgaattatttgcattggttgcatcccacaaggttgactcttaaataaatttagtttgttgcttgaaatttcttgggataaattactttgtgatgtagttttgaaaaaaaaacaggtaatatttagtctgaagtttgtctgacatactaagcaatgtaattaaagtagaagtcgcctaagctcagcactttattatgccttgaaattatactgcctgtcctacaggtgaaggtgttatgaatgcagtttgtcactgtaactctattcatagctctgaaaggctgagagtgactcagaagaatatttttgctctgaatatgaagaacgcttagactaaaactttaattacgatgctgaagaagaaagtggtaggtgattgcatgaataagtatgtaatattgttaatttctaaaaactgtgtatagttaatgtagtgcttctttttggaaaggctattgttaaattgatggtaaattctataaccaatatcaccttaaagcaagtacgcatgataaagtattataaaaccatgataatatcatatgtggcttattattgttccctgagtgttgtacaactctgttatgctgtgatgaaacctcatgcaaacaggtatgtcaaagatatgatgggctgttaactgagcttggcccacatatggtgtagtgacatgctcactaatgcagtgcagagataaccaataacagatcataacaggtttaaatatgtgcaaggagatgtcagcagaagctttcctacatagtgaatactaaacaagcctgacagcccaggatcatgttcggatcaatctagtgtgctaaaattaacatatagtcctacatttgagaatgtgtgattttcttggttcctgtctataaaataatattttaaaatacatacatttcaaatcagaagttggtgaattcactgaaatatttctagagaacactaggtattggggctcatagtgtgaaaaccactgacttaattcttcccccatcttggttgttcctgatcttcccttgtgtccccattccagccatttgtatccttagaaaatgatctcatattctacttcatctttatcttcattgtcaactgtcaggtagcaatatatgatggaagaagcatgtactttggaatcagacagacctggctggaatcctaactctgtcacttattaacaatgtgatcttaggcaatttacttaatctctctgaacctcagctactctcgtcagtacaatgagttatccttatctttacatggcacagtattattatgatatcaaaaattcattgagtatttactctgcatattagtcaaggttctccagagaagtagaaccaatgatacacacacacacacacacacacacacacacacacacacacacaatttattataaggaattgacttacatgattatgatggctaacaagtccaaaatctgcagtatgggtcagctggcaggaaacccaggagagtcaatgttccagtttgagtctgaaggcagtctgttggggaatttcgtccttctctgggaggccagcctttttgttctatacaggccttcaaccgattggatgaagttcacctttattagtgagggcaatctgctttaaccaaagtttactgatttaaatgttaatctcatccaaaaacacccacccagttgacacataaaattaaccatcactctctgtaagcactttctatgcattaagtgatagcaaataatgccagacatagggcgtctttaataaatggtaagcactgttatcagcaacaacaggattattataattagcaccttttcatctttctgtctgggctctgagaaagtacctctcttctctaaatttatccctcctttcctatgaattagacccagtgctttctctgaattatgaaggtcacactcctacaaatgccccttcccaattgcacatctgtcggctttctttgccattgacttttatctctagcttttaaatttacaggcatatgtcagttaacaatgggaatgcgttctgggtaatatgtccttaggcaattttatcgttgtgagaatactatagagtatacctacacaagcctagatgtcgtatagcctactacacacctaggcaatatgacatagtcttttgcttctaggctacaaacctgtacggcttgttactatactgaatactgcaggcagttgtgacacagtggtatttgcatatcggaacatgtctaaacacagaaaaggtgcactaaaaatactatgtagtgatctcatgggaccaccattgtatatgcagtctgctgtagactgaaatgtcatgcagtgcataactgtatcttaaatactcaaagtatcacctttgtttgtttgtccccttgtgtgcatcatcctaacgtggaatttctctgttgattagggccagcgtattagtttgctagggctaccataacaaaataccacaaatttggtggcttaaataacaggaatttattatcttatggttttgaagactagaagtacaagatcaaggtgttggcaggtttttcttctaagggccatgaggaagagtctattccatgcctttcccctaccttctggtggtttgctagaaatccttggcattccttgacttacagaggcatcaccctgatctctgttttcatcttcacatggcattctccctgtgagcctgtctctgtgtccaaacttctttactattaatataaggacaccagtcatattggattagggtctactttagtgacctcattggaatgttattacctctgtaaagatcctatctctaaataaggtcacatccttaggtaccgggggttaggactcaaacatacctttttttggggaaacacaattcaacctataacaattgataacactctttaggagcagaatgcgatatggaagtaatttgagaccataaagtatatacatgtagggagttaatctatgaaacctattgaaagccatatatacctcatgtatagtggtccataaatagcatggagacattgcagaggatgttaagtgatatgatacaggaacaatccaagaaggtcataagaaaaaggaccttttgctcttgagaggactgaagaatgactttccatttatgaaattttggtacatgtccactaaaaataggatgaaggccaaacttaggaagaatattttgataatggagaaggttgcatataaaaacattttattgaggacaattaaataatgttggctggaagttttaggatgatcatctttaggactcagaaaaagagaagaaacattattaaagaattgtccctgaacaagtataggcaccctcacatttgcattgcatttactatagaattgaaaaatgttttgaccttttttttttggcttttaatatatttgaccaagagtaacagctaagcaatacctatttgcaatcagtgtcatcatgtgggctccaaacatatcatgtttgtgtaattaattgattgacccattaatttgttcaatttctgctctgttccaggcactgaacaacatgatggagataaaagataaatattacacctgccttgtcctcaagaagttagtcttctgagggaaagaaattagcaaacaaattgtaatctcagttatgtgccatgttccatgctgggcacaggggatacagtagtttaaaaaaaacacaagatctataaggtgtttcttcttgtggaccttacagtctagggtgcttggaaacatggggcgttggcagacaagtaaatacacattttgtggtaaaggctcaggtagaagaagtacaggatagaatagagcacaccatggggaattaatctagacttcagagaggctcacacatacataatttatgtgtgactatttcaatgcatttgaggtttcttggaaatagaggttaggttttattttaaggaagttaccattttttttttcagtgtgatgtggttgaaccaaagaatgccatgcccagtgatggtaataggataatctttttaaaaattaagagccacctaataaatcaatagtttcattcagcgggagctcctgcagagttcaaaaagaagagaatctggcacagcgtttcctttaaagttcattttcctagagtgtgaatggaagcaagagattataacattttgaggtcaaaaaaattctgaaatgcctataaaaattattttctccaaattatcatcatttgtgcttttaatgacctgattgcaaagatgaacattttgaattcttaaattgcttattaggattggttaatgaatcaattatctattactgtatgttttgctattggaaaaaatagcaacttaagtgttttgcagacctttacttaggtatatgttgcttttatgaaaaaaaagatgtaaatattaagtaaaagggatttaaagcaaggcttttgaggtagagtcttattaattccttggtaaaccttgagccaattgttgtctatgttctctgcctctgtcttgctccttccttctgggattcactgtgggaatgcgggattgttaatctggggatgctgtccaatcctgcctctctcaagctttgctattgatctccctcccagtgataataaagcttgaagaaaatgaaagtagcgttagtattggtcctcaaactcaagaacaggatgaaacttaaatcttgagtcatacaattgtgtctacatactgctccccaaaaagagaagtaaagaagatgctaactttcccttttaatttgcagtacttagcaatttgttttcttgagggttaagtaataacagtggaagaaaaaagggttaaaatgccaccaagaacccaattccatgtttagtttgaaagtgggaaatcagctgccactgggaagtctgaatccaatgccatgatgttctttgaatccttctgagaaataatcatgtgtagccataacatacctgtataacagagcagagaacataaacaaatgaaggtgaagggaagattaagacagaagagaaaaattccagaatcgactgatcatttttatctgtttagatgatttcaggcagaatcctagagaccaactttatcacaactgaattttaaaaatcaccagctttgtcattgtgatgcagcatcagtttcagtattatccttggagtattaattcttaatcatcttcatcttagaacatttttgaggtcacttctagtctctatttcaccagtgaagaaacaaaaatccccaaactatatcaggtggaattacacagtattttttttttaattttggggaaagtcgattcaaggcagtaacttgcaagctagtgttagaaaggatttaataaatagtggtttttctgtacacatagtgagaggtcattacatcatttggttgttgaaagtcataaggatgtctagcatgcgctttgcctgtagtggttcatgccaggcagattcctgactcctataacccagagcttatcagagcatttatgtccccaaagagaaatgtcacctccatctttcaataaacactttagcaaagaaaaatcaagtactttaattccaaatcttgagttaattccagaataacaatgatggctcggaaaaatatgggtatttctgtcaaaggacagagaaacctagtagagagtatttactttgggtcctagtgatggtatctgaacaagctaggtgaacaaagagcctcaataagggattttgaggtctagaaaaagagaggaaataccaaataaatggaataattataaaataaataccagcaaagttaaatcaatatatcatgtgggagatatccttatatcactcatgtgatttctattttgttcctatattaggccaaggagaggtggaacttgttttcctttttccctctcagctacgaatggacatacttaaaactgtttctctgcttctgttctctaaaatgtgattgtctaacagtaaccgtgatgacgttttgacagttgcacaagtttctttctttaagctttaaaaatgccagccagtaacccagtggcatttctactataaaatcttaaggccaatccatttccccttttccttattttcttggtttcaaatatatttttattgccaatggaaataaaaatcctaaattagagagcaatggcatcccttgtcttgtgaataaagagctcctaaatgtgaacttatacaggatgcagcaatttatagggtagttaatcattcttctttctagccagttgttccagctacagttttgtggctcttgttagtggcttcattcccagatagaataaaaatcaaaccaaaatcctggaaaggcactctgaggatgcttctctaaagtagatgggcatcaactataaatcacaatgctttgtttcctctgttatgtttcaagatgggtgggattttttttgtagcattacttattattgcctctcaagtgcttgagtctttgaaatccaagtcatgtgagtgaattagatacagctgttagaagtggcctttcaatgccaatggtacacattccttggtttctttacgatactattgctcttacaacttttatctgaagtcataaattcatagttgtcccagaagttaagttccttgcttctagaggacagaaaacaaacaatttacacaactcatggtgcatgtcaccagtccttagatctcatgaaatatgcatgaaatcttaaatcacttgctgtagccacccagccattgacatatttgaaagactttagtgtatcaaagtcactataatgaaaattttgatttcaccagttctaggagtgaaaaatcaaatgtttagtaaaactttctaaaattaacactgacagttgatttctgtatactgttgttcttaataatagctttattgagatataattcatattcaaaacaacttacccatttaaagcatacaatccaatgattttttagtatcttcaaagagttgcctatcaccataaccaattttagaacactttcatcactgtaaaaagaaactccattcctattagcagtcattccttattccaaatccccctgctcgccctagacaactacaaatgtactttccatctctatagatttgcctgttctggaaattttatgtaaatagaacaaagtgttcttttgtgactggcttatttcacttagcattttttttcaaagattcatccctgttgtagcgtgtatcagtgcatcattcttttttatttttttagagacagggccttgctctgttgcccaggttggaatgtgcagtggcatgatcatgggtcactatagctttgaagtcataggcgaaagcggtcctcccacctcagtctcccgagtagctgagactacaggcttgcaccacatgactgtctaatttataattttctttagagacagggtcttgttatgttgtctaggctgctctcaaactccagggctcaagtggtcctcctcccacagcatcctaaagtgctgggattataggtgtgagccacagcacctggcttgcatcattctttttattgttgaataatatcccacttgtaagaatatgtattttatttatcctttccccagttaatagatatttcgattgttcctaattcttgtctattataaataatggtgctatgaacatttgtgtacaagtttttgtgcagacatccattttcctttcttttgggcatatacctacgagtgtaatggatgggccatatagtaactttatgtttaatattttgaggatttttcaaactgttttccaaagtggctgcatcattttaaattccttccaccattgtgtgagtgtttcaatttctccacatatttgcaacacttactattatctactcttaaaaattacagccatcctactgggcatgaagtggtatttcattgtgagttttttttttctttttctttttttctttttttgctaatgtttgtggattttcttttcattttcttgatggtgtcctttgaagcacaaaagtatttaattttgataatttccaatttattttttgttattgctgtttgtgcttctggtgttgtatctaagtgtatgctactttaaaaaattagttgtaatatggcaaattggatacatgtgtaggctttggtgtcacaatcctaattttaaaattctgactctgcccttgacaaattaactaattaagcttccttagcctcagtttctcaactgtaagttggagatattaccaagacctacctcttgaattgttgtggggatcagatgaaataatgtatgtgaaatatttagaattatgcaagtctgtggtaatgaatactaatgttagctatcattattgttataatcccaataataaattctggtgctttgaaaattaaaccaaagccaagcagttgatatgaagaagcatgtaataatgtacagacataatgctttatagacaacattgaatttggctctcatgaacatcaggaatagtggtcatggtagttattatctccagcaggaactgtagctgagagatcttcagagctttttccaaggcgatatcactgggaaataatagagacaaggttacaagctagggctgtgttttcttcttaaaatctttagttcagtttttttcaataacagatttgtagtaggcatcaggtgactggggattcgtattcttcaagttgaaatattaccttgttgagaaagaaaccatgtgtgagacaaccatgttgagaaagaaaaagtgattttatagaaaattaatattgatagtgagcattatatgaaaatcatgaagttagaacatatttggccagaaaatttacattaatagttacccatagcaattaatgcattataattacacataccttttctttaatgaaaaagaattctttccttccaaagttatgcatgctattgttaaacattagagaatatagagaagcaaaaaagaaaatatcttttttgatattttcttaacatacgtctgttcctaataatgtttatagtttagaagcattgcatgaaatgggtagatcaattttctatttaatgtttggattcattaggtacgaagttagcaaattaatttccattagggtgcctgtatggttgtaaatcctggacctgcagaagatttttcagtattggtttgtagtcttttgtttagcagcaaataattagttctccagagcttctgaaattaattgaccactttaatggtgtttacctacctagagaaagaaaaagaacttctccaagtcccttggtaaaattaagcctcatgaacaattaactcaaatatacacaaggcttgtctttagcgagcatatactccctaaagttgattaagctgaccaagtgattactgcttataaattcaccattttatggagaagaagcaaacactgctaaataccttgtggaatcagaggaggggaaattagtaacttgaccccaatactgcgattttaaattgaattcttgaagcctacaagttttacacaggactttagagagctggatagtatcactttgtcaagtcctacttttactatgattctttgagaaaaatacatctgactaaataactctgaatctaaattggataaaataaatgtgacattcaaaatgttatttatgattttagaaaaatatccttatagacactagatgagttttagtctcaaatcaatcctccctatcatagtcacttatcaaaataactaaagcaaagtggtagagctgtgctctagaagtttgggatttatgatcacaatcttttccaatgagtcccctctttcctctgcctgtcttcaacatttgtttttttttttttttggttaggactatccagattgtgtggcctatttcaaactcatggcaaatacattggatgatcagaaattttctaatgtatttgaatttgtctacacaaactagagtaattgctattaattcctcaagtgttaattatttcatgcaaaaaggaaaaaggctattagtctttaagtgtattagtatgtcaatatttgggagaagtgtcatgcaattagtggtttgaatttcctattttattttattgcattttattttatttgcctagtcaaataaaaagtaatgttaaatacatggaagcatgattgttttctacactaaaaatcattttgacttgaaaagatctgatatccatgaccttcatctgaagttttggcagatgaaaatgtcagatgcgtcttttggattaataaaaggcaaaagtcagatcgaaaaatgagtataagctttaattatatgactttaggaggatatgttatgaaaatcaaagctttaatagtgattataattggcaagttctttttttataaggaattacaagtcactctatacaaaaattggaatttttgtcctaagaaatgaaatttactatagtttcatctgtgtgtgtgtgtgtgtgtgtgtgtgtgtgtgtttaaaaaatcaagtgatagggcttttcctcaataaaatctgaaatctcttatagttaagtgaacagaacagtgtatctaggatgctagacttttttttcaaagttagtttaaaacttatacatagtaaaatctgtatgccttagggatctctgtttgctatcccatagtgaatgattaattagtttctgttagaaatagtcagaactaggctgggtgtggtggtggctcatgcctgtaattccaggactttgggaggccaaggcaggaggatctcttaagcccaggaatttgcaaccagcttgggcaggctggtgagatcctatctctacaaaaacaaacaaacaaacaaaggacaataagaaagaaagaaatagccagagctttgaacaaaatttctaagtagaccaatgtaaaagtctgtcgtcaatatgtagtggctatgaatggaggttatgaatgaaagagaaggataagatgaactagaggtgagaggggaagacagcaggcccaagtgaaaggcagagccgagtttattgctttttggttattccaggtgtgtctgctttgtctcatgaaacacctggatgatcactgatttctagtggaagaaatgctgaaaagtccttactgtgcatttaaacattctaggtttaatatactcagggtttttcaaaagaaagggtggctggagttttgcactaactaatatttcataaagtgtctaagtatagatgtctggtttttttttgtatttctaagactggcttgaggtaggcatggagaattctttgatgggacataattttcttcctttctttttttttttttttttttttttttgagacggagttttgctcttgttgcccaggctggagtgcaatggcacaatctcggctcactgcaacctccgcctcccaggttcaagcaattctcccacctcagcctcccgcgtagctgggattacaggcatgtgcccccatgcctggctaattttttttgtatttttagtagagatggggtttctccatgttggtcaggctggtctcgaactccttacctcaggtgatccacccacctcggcctcccaaagtgctgggattacaggcgtgagccaccgcgcctggcctgatgggacatatttttcattcaattttattgatttaacctcacaaaataaaatatttccttaagatgactctgtggtcattgttgggcagcataagcttaatggattttagttatcataatttaccttaaacccaatttgtatttcaggatataaatagaggtttattgtagtgaatcttccaggaaatactaagtgatactaataattatagatggtgaacttaagtctttatattactgaatttgtttggtttgatgatgctaggctatggcattcttgctaatcaaaacgatgtgtcatggtgtaacataacttattaaaatgggcacagataacacaggaagctttttataaaagcagctcacaaattgtgttactttgaactgaactggccatttatgggaaaggtcactgggttgtaaataaggaccaaaagagttacgtttatattttttaaaagagattgaggagatttatttttacatttcttgaaaatgccttattttggtatggtattgacagatagtgaaattctgctcatttgtaaatatagtgtcatattttaataatttcaaacatattgaaaatgcagaatttattaatagtgggagcacattttcctttttactaaatgttctacaggttcttttctttccatccacacacagtgccattaccctcattctaagcctttcaaacatctggcagtaagtgatctgctgcacttagctctttccagctgagctgatttttaaattttcagaaaatttgtgagctaattgttaaacatggccattattaaaaattaaattatttcaacttataattaaataaattatattaaaacaaaagtattaaaaactcaaaagttggctgggcgcactggctcacgtctgtaatcccagcactttgggagaccgaggcaggtggattgcctgaagtcaggggttcgagaccaacctgaccaacatggagaaaccctgtctctactaaaaatataaaaaaatagccgggcatggtggtgcatgcctgtaatcccagctactcaggaggctgaggcaggagaattgcttgaacccaggaggtggaggttgtggtgagctgagattgcgccattgcgctccagcctgggcaacaagagtgaaactctgtctcaaaaaaaaaaaaaaaaaaaaaaaagaaacaaaaaaaaaaaaaaaacaaaaagcaaacaaacaaaaaaacaaaaattatcacttcctaattattttgcattttactattatctatgctattaacgttatttgccttcattgtatttgaaaggtggactatattctattgcactttcattgtactatattctaatatgcaactgtgtatcccttcccaactctgtgttcaatgactttatatttggttgctttaaaatgatgacgatgagagtatttatatcatagaaattggcaaatgccgtaagtcagtttttgtttttgtttttgttttccggagaggggattgttaaatatttgcctgcatgcaacaccactacatgcagtctgctatcttttgttcttcctgctttcaggctcctctcccagctgtctgtctagcacaacccagcataccaaattttcttaaatagggaaagttgaacatggtaaaagaatgaatgaagtcaaaagaatgtggaaagacctaggctttgccatttagtaaagtttagcatctctaagcctccatctctttatcaataaaattgagcaatgatcccttttagttctacccatttaagaagattttcaaatgaaaaccacaacctgctcatgtttatgaaggcactttggaaagcgctaaatacacgggtttttattagtagtaaacacttacttcacctttttcacttcttgactttagtttacaagggctcataatctaaattatatcataaattgctgtcccagatttttttacagcctaattgccacctgtatgttcgactttccttctgttctttatgttagatactgggatagtatgcaccaggtgggtgtgccatcactttctcagatgatgtccactgaagaccttgcatgatcatggcattcattttcctgctgtattcagactggcctcaactattttctttattgctctccaggaaaaattacaaatgaatcagactgggcaatgaagggtaaacctaattatcgctctttgttaaagacagctcttgttaaaatgcggatattgcaaattaatggaaaaaatatgacatagtaaaccatactcacttattaatatcttagtaaggaataattgatgaagttacttaaccttagagccctaattcagttaagttttaatgaaggacaagttgtagagatatcgagaacccagggcaggtgcctactgaagaagttccagaccaaggaagtataaagaaggacctgggtgggagcagtgagattggatatgagggccactggcaaagttttgccccagaacagtgtcaaaatgtttgcatttggcatagccctttctctttttgttctgaatggctttgctagaatatcttttctataatgaatttatcctgcttctcagatattgctaaagcactcccttttgaattttggtgctttaacatgcattttgatacattaccaaataaggtctgaatgacacaaattttagaactctccagagaaaagaaagatgctgagggaaaaagcataggtttgggactcactaaatcccagttcaattcctttctttaataaatatattcaattttacctgagaaagctctcgtgctctcgaattttatttagaaatttctctttgtacatgattgatttcacaatccttcttctgcctcctcttctactttcttctttctagattttcctatctttatgaagattattctgccttatcctcaacagttagaaacaatatttttgaaaatcactacggtatcctgcatagtgatttcccatgccaactttactaatttccattataaattattatttattgatgcctagagggcagatgagtgtagctgctatggagtgaggagacaaaacataagaaagttatgatcctaccctcaggtaatgattcagacatgataattaagtcaacaaattgatagaaactaatcactaactctctggctatagtcattctttcaatgaatagctcattactgagtatgcatgctacagtaacaaaattatataaggctgttgattaaatgttgattaagtgcatgtcttattcagagtttttttatatttgaaatggaagaggctggacttcagtaatttgctataaactgctagtatatgattatttgggggcagttattttttaaagaataatttaaatatggaatgtttagcagtttgttttttccctgggaaaaaccatactattattccctcccaatccctttgacaaagtgacagtcacattagttcagagatattgatgttttatacaggtgtagcctgtaagagatgaagcctggtatttatagaaattgacttattttattctcatatttacatgtgcataattttccatatgccagaaaagttgaatagtatcagattccaaatctgtatggagaccaaatcaagtgaatatctgttcctcctctctttattttagctggaccagaccaattttgaggaaaggatacagacagcgcctggaattgtcagacatataccaaatcccttctgttgattctgctgacaatctatctgaaaaattggaaaggtatgttcatgtacattgtttagttgaagagagaaattcatattattaattatttagagaagagaaagcaaacatattataagtttaattcttatatttaaaaataggagccaagtatggtggctaatgcctgtaatcccaactatttgggaggccaagatgagaggattgcttgagaccaggagtttgataccagcctgggcaacatagcaagatgttatctctacacaaaataaaaaagttagctgggaatggtagtgcatgcttgtattcccagctactcaggaggctgaagcaggagggttacttgagcccaggagtttgaggttgcagtgagctatgattgtgccactgcactccagcttgggtgacacagcaaaaccctctctctctaaaaaaaaaaaaaaaaaggaacatctcattttcacactgaaatgttgactgaaatcattaaacaataaaatcataaaagaaaaataatcagtttcctaagaaatgattttttttcctgaaaaatacacatttggtttcagagaatttgtcttattagagaccatgagatggattttgtgaaaactaaagtaacaccattatgaagtaaatcgtgtatatttgctttcaaaacctttatatttgaatacaaatgtactccctgggaagtcttaaggtaatggctactggttatcaaacaaatgtaaaaattgtatatttttgagtacctgttacatgccaggtagaatatctcctctcagccactctgagtggaaagcatcattatctctattttacagaaaagcaaactgaggctcagagagataatatactttgccagttaatgaatgatggagccatgattccagctgaggtctgtattgccttgctctctaggaatggtagtcccccccataaagaatctctcagtttcctttccaatcaaaaggttaggatccttttgattgccagtgacagaaacccaatttactagcttaagtaaataaaaggaacgaatttattggctcatgaagcctgaactatgtgaagacctaggtggagaactggccttaggaactcaatgggaccaaggactcaaatgccacctggtggcatttgccttatgctggttttattttctcagaccggaccagctttctacataaagtgggtccctggttagaactctttgctcctatctttaaggaccacgaaagaaggagccctttgtccttggctaaatgtgaaaaatcccagagactcttgagtcatagtgcttaccccttgggccactcatagtctagaatgaactaggctgagtctcgtgccaacagcacaggcctgatgccagataaaagggtgagtgaagggggataaaaaataagacatagctactaaattattgcaccaaagtaaaaacattgagttgacttgcaatttgtttcttttaattaaattcatttcctttttttggcattttgaaggcaaagtaagatattaaactttatttttattgattttattcaaagaattaagctagtgggagtagcagattcacacttctaagatcaagggccagcttctattattgaacacttggtgtgtgcaaatgccatgaggtagggatactttgttttgttttttattttttattgggttcgatctcttttgtttatgatgtatccccaagtgcctagaatagggcctggcatatggtatatactcaataaatatttgttgaatgaatccatgatggaatgtgaaatggctagcattacatagaaacctgtagcattgctggagagataaaatatataaacataatccattgcaggtatattgacaagttcaaaataatataatgggtattgaatatctaaatgtttgttgttgttgttgctgttgtttttgagacagagtcttgctctgttgcccaggctggagtgtaatggtgcaattttggctcactgcaaacttcgtctcctgggttcaagtgattctcctgcctcagcctctcgagtagctgggtttacaggcactcgccacaatgcctggctaatttttgtattttagtagatgtggagtttcgccatgttggccaggctggtcttgaactcctgacctcaagtgatctgcccaccttggcctcccaaaatgctgggattataggtgtgagccactatgcccagctttgaatatctaagttttaattggatgctgagggaatgattaatcagagtagggctgggttaattgaaaaatgtgatacatttgtatttatggccagatagagaacatgaatctgaatttgcagaattatctggcttaacatttttttctttccagttttcactgtatcccccatgttgattcaatttaaaaaatatacctattttacttcaattcaacaatgctatgccagtacaaacccatacgttctattatttttgttttgttttgtttttgtatctccaccctgttacttcttttcttataaaattggtatttgaaatttattgaaatattttggaagagtgacataccatttttggtactttgtacctctgcacccttgggaagtgaccctggcttcacatttcataactgccttgtgaccatggccctcaagtggttgccagatggttgaagaacattaacctatctggctcaattttgtgaccatggattgaatcctctacataactgcagtgtgcaaaccacacatccgttccaagattgtagtcaggatatgaactttttaagaataaaacttcttcccttctgatctgggcctggtatgtggtcctactagaaccacatcacctactcttggtgctaacaatttgtggcaccaagttgttcaagtttcacccattaaagaaattccccgaccttgccttctcctcaggtaactaccccattctattttttctttcatagctaacattctctgctctcctggtctctctacttcactttcatttacatctcagctcctgaagtatggtttccaccatgttcctaaaactacattgcccagggtcactagagacctcttatgaaatataacaacacctttctacattacttccgtgtggaccactttttcacattgaacccattttgttggtttatgtacacaccccttccttggctttcccatctgatccatttctcctttgatggagaaggtgagtctgctccatatttagcttcttactctgagtaaccaaatgttatggatgggaggttagctctgtgtgtgagagaaaggtggagaagcatgtggggagggaaatagatgggaaaaggtaattaggctttatagaagggctctcattagcaagcttctaggggatgccaagatccatgcttagagattgccaggcttgtcttcaaatctcagctgtgtattactcctttatgttttttgtttgtttgtgttgtttgtttttgagacagagtctcgctgtgtcacccaggctggagtgtagtggtgtgatctcagctcactgcaaactctgcctcctgggttcaagcgaatctcagtctcctgagtagctgggactacaggcatgcaccaccaggcctggctaatttttgtagagacggggttttgctatgctggccaggctggtcttgaactcctgacctcaagtgatctgcccgccttggcctcccaaagtgttgggattagtggcgtgagccactgccccggcctattactcctttagagtgatttagagccatgtttacttatggtaacttgacagtaatgggaataaccactgatgaaacgtaaagcctttgtctaattgtttacctagttcttccttgtggttcatgaaatttttcatctctgtacagtttgaaaattaagatgataatatttagagatattttattcctttgtgaagagaaaaaaggctttcattaacagaaatcagtggcaataacttaataaatacaatcagctggtgttcctatagtatttaaaagaaaacagaaagtttactagatttcagccagttttcagactatttaatgtctattcttactataatagaaaatatataatttgatcttgttctcatttttcaaagacctttaatacatgattttagtagttgaaaatgaagtttaatgatagtttatgcctctacttttaaaaacaaagtctaacagatttttctcatgttaaatcacagaaaaagccacctgacattttaacttgtttttgatttgacagtgaaatcttataaatctgccacagttctaaaccaataaagatcaaggtataagggaaaaatgtagaatgtttgtgtgtttattttttccaccttgttctaagcacagcaatgagcattcgtaaaagccttactttatttgtccacccttttcattgttttttagaagcccaacacttttctttaacacatacaatgtggccttttcatgaaatcaattccctgcacagtgatatatggcagagcattgaattctgccaaatatctggctgagtgtttggtgttgtatggtctccatgagattttgtctctataatacttgggttaatctccttggatatacttgtgtgaatcaaactatgttaagggaaataggacaactaaaatatttgcacatgcaacttattggtcccactttttattcttttgcagagaatgggatagagagctggcttcaaagaaaaatcctaaactcattaatgcccttcggcgatgttttttctggagatttatgttctatggaatctttttatatttaggggtaaggatctcatttgtacattcattatgtatcacataactatattcatttttgtgattatgaaaagactacgaaatctggtgaataggtgtaaaaatataaaggatgaatccaactccaaacactaagaaaccacctaaaactctagtaaggataagtaaaaatcctttggaactaaaatgtcctggaacacgggtggcaatttacaatctcaatgggctcagcaaaataaattgcttgcttaaaaaattattttctgttatgattccaaatcacattatcttactagtacatgagattactggtgcctttattttgctgtattcaacaggagagtgtcaggagacaatgtcagcagaattaggtcaaatgcagctaattacatatatgaatgtttgtaatattttgaaatcatatctgcatggtgaattgtttcaaagaaaaacactaaaaatttaaagtatagcagctttaaatactaaataaataatactaaaaatttaaagttctcttgcaatatattttcttaatatcttacatctcatcagtgtgaaaagttgcacacctgaaaatccaggctttgtggtgtttaagtgccttgtatgttccccagttgctgtccaatgtgactctgatttattattttctacatcatgaaagcattatttgaatccttggttgtaacctataaaaggagacagattcaagacttgtttaatcttcttgttaaagctgtgcacaatatttgctttggggcgtttacttatcatatggattgacttgtgtttatattggtctttatgcctcagggagttaaacagtgtctcccagagaaatgccatttgtgttacattgcttgaaaaatttcagttcatacacccccatgaaaaatacatttaaaacttatcttaacaaagatgagtacacttaggcccagaatgttctctaatgctcttgataatttcctagaagaaatttttctgacttttgaaataatagatccataatatatattcttatggaaatctgaaaccatttgggcatttgggggtaaaaagtattttattagtaaatttaaatgaggtagctggataattaaattacttttaagttacctttgagatgatttttctcaatcagagcaccacccagagctttgagaaacaattttattcacagcttctgattctatttgatgtaatttttagaaaataagttttgctggttgctttgaatcagggtatggagtacagttcactctgatcctatcatataaatcatgtaagtatataacattttcaataagtgattgttggattgaagtgaatgatatttcaagtaattgttatgtcatggccaagatttcagtgaaactcaaaatttctcctggttgtgttctccattgcatgctgcttctattgattaacctaagcactactgagtagaagctggaagaggggtctaattagaaggcccctttctatgctctgcttggcttgtaaaataatttatttctctagatcccaccaacatagtagtttcatgtatgcaaaaacacccacctaaatgtcaaagtttgtatgatacatggacatatctatagaattttttttggtctggtgcatgccaaaaaataaacatgatatagaagaatttaatatttattgagtacctaatctgttccagttcaatatgaaggtctttatgcagattattttacttaattttcctagtaactccatggagcaaaaattatctctaatttatataacaggaagttgagcgtgaggcaaattaagtaactttcccaaagttacacatatggtaagtttgagagatatcccagtctctttagctccaaagcctttgaccctttcaccataccagattatgattgctattaatatataattataattataatgattgtatttaggtactcaacagaatggtgactctagtaaccagccttggttctgctgagcttctctgcgtcttctcaggagacacaggctacagagcttgaaggctgaggattcttccagggtcacttcaggggcaaatctgaaactttcttcaggacaggaatcaacgagatcttctcacttacttatacctgggggaggaactgtatgaaatccacccaagaaccagtcatgctaagggccaaacctatagacaaaaaaagggataggagaatggagtatgtatggagaaagactaaattgttcttaaacttctcaagcttaaaaatatcccagcaaaagagatcgtaaaagcccttcatggcgtattaattatccatgcatgggggtgagtggaaaggtactcctgagcccgaggctacagctttggaactagcagcacctttgaaggggaaagcgtgtttccatcatctcaactcctactgataaccaatggaatattggtgagtaaaggatcctgggggaagaagcagctgaaatgtgtaggtgagaaggcagagagaagaatatttatattgggaatggcacaagtgtgatgaggctgcaggtttttcacccttgtcatagagaaaaaaccacgctgacaccatgcagttttaaatagtgagaaatttgcaaattgttagatcttaaataatttagataaacatagtggccatttagattattgcagttttttcaggatatctgatctcttgatttcattctttttgtctcttataagaataaaagggggggagaaaatttagccattatagtatttctctacattttctctgtccttttacataacttacaccagtgccttcctatttatggtattatttatgggtatttcttcttttctttcactgagcaaggataaatgagccagggattcttgaaactactgtaacacttctcttagaaatagatggtcatactttcagaatctctacacattcttagtccctctaaacaatgatagttgtggcataaaaatatttgcttggtttcaggactgatagagaaaagtactataaaatttgctgttaactgtgaaaggttaaaaaaaaggaggtgccatcatgaaggagctaatctttctgaagtactgctgtagttttaaatattattagctatgacttctcaccattaactatgcacttgctttttcttcatctgactcagcagccagatagatgcaacattgtctttaacatttaagactcctagcaagtccgggcacgggggctcacacctgtaatcccagcactttgggaggccgaggtgggcaaatcacaaggtcaggagtttgagaccagcctggccaatatggtgaaaccctgtctctactaaaagtacaaaaatcagccaggtgtggtggcgtggtggcgggcacctgtggtcccagctacttgggaggctgaggcaggagaatagcttgaacctgggaggcagaggttgcagtgagctgagatcgcaccactgcactccagcctgggtgacagagcgagactccatctcaaaaaaaaaaaaaaaaaaaaagactcctagcatggaagagaaactggctgttgaaaacctgaatgtgagagtcagtcaaggatagtttgagggaagccaagtagaggaagctctcacaagcagattggtgagagaatatgattatacaatgcatttattatgataagaaattcacaagcattcattcaaaatactcttgattcctaggcagctctgggcatatttccaccaacaaattgaggcatatgtcagtgcagcctaggtcagactaccttttttcattaaacctcacaaaattaaaggacatacaggagaagtcctggtactcatgttgcagactacagtctatatggcaaaggaggatctctgtcccttatgtttggatgaaaacattgggtaggcatttgaatacaagcctactgctaatatggggctaaggtctttggccccctaaaggtttgctgaaatattactgacaggaggcagattgataagaggaaaagcacataaatgtatttgacatgtatacatgggagccttcaggatgaagacctaccctctcagtgcagtatggaagcttgtataccatcttgaggttacagaaagaatgggggtttggatctttgtaaaacaggtttcagtggcaagacaggttatgagaaggagaaaggaagagacttgggtagcaaagggggtcttgttttgtaggtaaatcgttggcagcccacagagaaaatagatggagaatgtttcttttcagaccttggcaggtgtcagattctcagttaatctctcctagatttgaaaaaaaaaaaaaaggtctagaaagggagagcctggctgcactaacacattttctacagatgcaaatttctcccacaaaatacagctttgcaggtccacttctatctgctgggcctgtggcaaccatttcaaaatatgtgaatgaaatatatgtgggggtaaactatttttatttacttccctaaagaagggatggtgttctctcgggaattctgtgcatagagagcctgtggcttaggcactttgatttatgtatatctcttcctgtgattggctatctagggactgctatctccagcaaatcttctaaatgtctgccatgtagaattcctttctcatctttctgtctcacccccttatctagctgcttctctaaccctagagtgacactgcactccccacaatctcctatgtcctgaatattttaccccatcctaaactccatctctaacacagatgcactttcttgtgctgcctactgcattgtacatcttccccttagttcccatgatgcaactctgccctaccccagaaaatgtaatttaattggtctgggataaaacctgggacactatcattcttgaaatattccccaagcgattctaattatatagccaaagttgagaactatttgtagacaggcatcagcatgatcacttaatgatttgacttttgctagatctaaggtgaggaaattggagagtggtatccataggaagaactgtttagtttaattttttttttattttttcttctaaaaaaaaatccaacaacgagatacatgtgcggaacatgcaggtttgttacataggtataatgtgccatggtagtttgttgcacctattgacccatcctctaagttccctcccctactccttacttcccaacaggccctggtgtatgttgttcccctctctgggtccacctgttctcaatgttcaactcccttttacgagtgagaacacatggtgtttgattttctgttcctgtgttaatttgctgaggatgatagtttccagcttcatccacgtccctgcaaaggacatgatctcattcctttttatggctgcatagtattccatgatgtatatgtaccacattttctttatccagtctgtcattgatgggcatttgggttggttccatgtctttgctattgtaaatagttctgcagtaaacatatatgtccatgtgtctttatagtagaatgatttatattactttgggtatatacccagtaatgagattgctgggtcaaatggcatttctggttctagatacttgaggaatcgccacactgtcttccacaatggttgaactaatttacactcccactaacagtgtaaaagcgttcctatttctccacagcctcaccagcatctattgtttcctaacattttaataactgctattctgactggcatgagatggtatctcattgtggttttgatttgcatttatctgatgatcagtgatgctgagatttttaaaatatgtttgttggccatgtaaatgtcttttgtgaagtgtctgttcatatcctttgcccaccttaatagggttttttttttcttgtgaatttgtttaagtgccttgtaaattctggaaattagatctttgtcagatggatagattgcaaaaattttctcccattttgtaggttgcctgttcactctgatgataggttcttttgctgtgcagaagctctttagtttaattagatccaatttgtcaattttggctttttttgcaattgcttttggcattttcctcgtgaagtctttgcccgtgcctatgtcctgaatggtattgcgtaggttttcttctagggtttttatagttttgggttttacatttaagtctttaatacatcttgagttaatttttgtataaggtataaggaaggggtccagtttcagttttatgcataatggctaggcagttttcccaccaccatttactgaataggagatcttttcctcattgcttgtttttgtcagatttgtcgaagatcagatggttgtagatgtgtggtgttatttctgaggtctctgttctgcaccattggtctatatgtctgttatcgtaccagtcccatgctgttttggttaccgtagccttgtagtatattttgaagtctggtagcgtgatgcctccagctttgttctttttgcttaggattgtcttggctatatggagtcttctttgattccatatgaaatttaaaataatttttttttattctgtgaagaatgtcaatggtagtttgatgggaatagcattgaaattataaattactttgggcagtatagccatgttcacaatattgattctttctatccgtaaggacgacactttttccatttgtttgtgttctctcttatttccttgagcagtggtttgtagttctccttaaagaggtctttcacatcctttgttagctgtgttcctaggtattttgttctctttgtagtgattgtgaatgggaattcattcttgatttgcctctctgctgcctgttgttggtgtaaacaaaattcatttcttgttcttatttgtgaaattttggaaccaaatctattttcaaattagaaattgcttgtgataatggttttgcaacttagactggatatgagacgatgagatattagttctttcattcctttgtaggaatatggtgcatcttgcattattttagctaactagtgtcctttaatgactaatgaatatgacatggtgaaacaaagtaaaatatatatgatgcactaagtatgcattgtttccaaaggttcagcattttttttttgttaactctgctgggatctgctttatgcactgataacataacttattttatgatcttaagcaaataaaaacacttatctggacctcagtttccttaactgtacaactgagggaaactgtatagtatagctatagtacagtataccatctttaccgtcacttccatcttttaaattatgtgtatataagatagggcctagataaatggtatttatcttaaattacagtgatactagcttataacttaatttgctaggtcatgttgaactgataacaatgtgtgaactgatgagcaactgagaagtaaccaggttgtgttataacagtttgtttttgatttagggttatcagtgagggtggcggtggggaggggactttggagtctaactgtctagttcaaatattagtttttgtttatttttatttttaatttttgtgggtacatagtagatgtatatatttatggggtacatgtgatgttttcatataggcatgcaatgtgaaataagcacatcatagagaatggggtatccatcccctcaaacacttatcttttgagttaccaacaatccaatgacactctttaagttatcaaatcacagttttgccagctactagccatgtgattttgggtaggttacttaaattctcttcatctcaatttcattattgtaaagtggagataatgatagcacattttttctttttcttttttcttttattttttattattatactttaagttgtgtgatacatgtgcagaatgtgcaggtttgttacataggtatcaacaactctataaaacatgttctatccaggaaaagaaactatcatcagagtgaacaggcaacttacggaatgggagaaaatgtttgcaatctagatggcgattgcaatggcggttcgctgcatccatcagcccatcatctacattaggtatttctcctaatgctatccctccccttgctccccaccccctcacaggcccctgtgtgtgatgttcccctccctgtgtccatgtgttctcattgttcaactcccacttatgagtgagaacatgtggtgtttggttttctgttcttgtgttagtttgctgagaatgatggtttccagcttcatccatgttcctgcaaggacatgaactcatccttttttatggctgtatagtattccatggtatatatgtgccacattttctttatccagtctatcattggtggacatttgggttggttccaagtctttgctattgtgaacgctgcagcaatgaacatacataagcatatgtctttctagtcaaataagttataatcctttgggtatgtacccagtaatgggattgctgggtcaaatggtatttctggttctagattcttgaggaatcgccacactgtcttccacaatggttgaattaatttacactcccaccaacagtgtagaagcattcctatttctccacatccgctccagcatctgttgtttcctgactttttaatgatcaccattctaactggtgtgagatggtatctcattgtggttttgatttgcatttctctaatgactagtgatgatgagcttcttttcatgtttgttggctgcataaatgtcttcttttgagaagtgtctgttcatatcctttccccactttttgatggggttgtttttttcctgtaaatttgtttaagttccttgtagattttggatattagccctttgtcaggtggatagattgcaaacattttctcccattctgtaagttgcctgttcactctgatgatagtttcttttgctggatagaacatgttttatagagttgttgtgagaattaaatgcattaagcacatagaatagattctggtacatagcaagtgctctctctatatatggaactctatatgtagttggtgcaaaagtaattgtggttttcaccattgaaagtaatggcaaagaccatcattaccttttcaccaatttaaatatatggaaggaatatatatataaaacctatatatatatgtcacatatatgtctctaacccattattataatatataatacaatatatattataattataattgtatataacatatgttatataataatatagtaatatttattctaaataaatatataatactataaataatataataatttatatatatgattataatatataataggctatattatatattattaacatatacatatgtgtatatatatgtctttcatagacttaaatatatagagcaataataggttagaaaatagcaaacatgtatatataaacatatatacatatagaaaacatatataaaaacatatatatatatatatatatgtgtgttttctgcctttcatttttagagacagggtctcatcatgttgcccaggctggtctcaaactcctgggctcaagtgatcctactgctttggactcccgaagtgctgggatttcagacatgagacactgcacccagtccagtccctgtctttttaaatagactctctacctaagtgcacaaatactcattatttacatttagttatttctgtatatatgctataagcaaatcttgtagcaccagtttgatttttataaggcacaagaatatattttactaatgctttaaaatggcagctagattctagtattactttagaaattaaaattaatattttaacacatctttcattattgtgttatctgaaccaaacctattattgctgctatttcagcaaatccaggggctttttcttataaaatatgaagaatatagcttagatttctagtgaagatgttaccagtaataattaataaaatcagtaagcactaaaaggaaaataccaaaactaaagcattttgaattagtcattgaatctaaaagaaaggtagatttttttctgagattctgttctaggtgtggtatatgtgtatttttgcaaaaactataaacaattgtggcaaaatgaaggaaatatttaaaaacaaacctcttaattcttcagtggattaagcgtgaatatgtttttattttctatgatgaatatggaaaaattcatttccttagcaatttgtatgagcccaaaaactattgtcagactctgctgtatcaaaatagacaaaaaattgacactcacttttaccctgccaaaagcaaaatcttaaacttttgctttagtatataagccagcattcattgtatcctatgatgggttctgagtgtaggtgtatttgctttcttccattttttgtatgcatgttttctttttatttattattgtaagttgtatgaaatttttatccaaatttttattttcttctgattaataatcagaataatcagataattactggtaaatttgatgttaatccttccagctttttcccatgggaatttatacttaataaaggggagaagtcatcattacataatgtgcatattaatctgcttctccctttaatgtgttgtgaatgcctttccatgtcattagatgtttttctacctagttactttcatgaatcatatggctgtaccatgatttatttaatcagttcctcatcattgagtatgtaaattgcctccatttttttattactataaaaggtccttcagtacacacccctttaaaagctgactcttagaaggtgttcttgactctctacctaagtgtaaaaatacaaataaattgctttccagaaaaggtgcactactattttactttcctgatactaaactatgaaaattcagtcctaacaatagatatttaaataaagttttaaaaatgccaagtgaaaaagagcatattattattttcatttgcattacttttggttcctggtgagtttaatctgtttttgtatattaattatgcatttatatttctttttgtgtgtgtgaattgcctttcatgttctttgtgtgtttttattttgttgtatttgtctctttcttgatatatgagagaatattttccctagcctgtcaattgccttgtaattttgtttctagtgagtttttttttttttttttacaattaaaagctttaatttttgaaaattttgctggcaaatctatatatctttttctttgttttctgctttgacattattcttttataaaggcccatgccacccaaatattatgtaagcatgcatctatgtttttattacttcatcttttacatttaaatatctactctatttagaattcattgtgatgcatgtatgaggtagaaatctaatttcaaaaagatgagtatccagtttgtccatcatttattgcatgatctctttctccactgaattaaaatgccgtattttataatatattaaagtattacatgtgcttggacatgttcctggacttttgagataaatcagtctatttctttgtcatgtcacatattattatggctttatgatttaatatccagtaatgtaaaccctctgacacattattcttattcctcaaatgtttttgatgagttttcttccaaatgaaatttataatcattttattcattgattcaacaaatatttgttgaatggatattctgtgcttggtattgtgcatggtattaggattgttgcaaaaattgagactgacagtccctactcttacggtgctaaaaattcacttccaaaaaaatctttaaatgttgatgaagattgcactaatcttataaaataacttggaggggaatgtaatctttgcaacattaagttcttcattttagaaagttttaagactctccatttatttgagacttttaaaatatgtcccaataatgttttgtgagatgtatattttaagatatatatcttattgctattacattgtatcttttgttatattgttactatgaatgggatactcatttaattagatgtcatttttggtatatagaaatctattttcttagcatagtcattttttaaacctcgatctattaaattcttgattcatttacatttgttacacaatcatattctatgctgataatacttcttgcttctttccaatatttgtacctcgatcatttttcttgttgagttgtattagctagaagttctagaaaaatgttaaatggtagtaatagctagtattctgttttttcctgactctaaatgtaatgcatctagacttttataattatggcattgattgtaacattttgaggaagaaatcctttttcaggttaataatgtatctttatattcaagtttattaagaacatttattggaaacatattgaaattttatcagattccttttcagttgttactgagataatcataggttcttctgtattcttttaattaatttctcaaaattaaactgtcctattattcttggaataacgacatataaagtactgtatatttaaaagaagttaaaatgataatggtgattttattaagtgacctcacacaatagaaaacagtgtagccttagaagttttccaagtgaccattctacttagaaacaaccctgctttgggatcagaactgtaatttttaaagtaaagttttctgggtttaattcatttagtgtaattacaagcatgagttcaggtttctatttttttcacctgaactttccttcatggtttgaatatctagaaaaagcagactttcctatctctagactaaacatttgatcctatcttaggtatgcattacaattttttaaccataaatggttaaagaatttagactcatctacaataactttgaagctctggtcttgaagaacatgtgagaaatgagatataactcctagaagatataggagacatttttagtcttccaaattttccctgggaggctgatctaaattgagtcacaaaattgttcccaccaggaatgcaatcacttgagctgttttctaatctgagcccctctacccagatgatcttctgaactcatactgttcagactttcatccttctgagtagaaaacagccatagtcatggcaggatgagggctaggacaattacccaaggaattcttggcctctgccatgggactctgcagactcagatcatataatcagagatgttagcactggaggggacatcacaattagctttctccacctcttagtttatcagtgaggaaaactgtccagagcgcggaagagactaaaataacacagccaatgtaggtaatgtgctggataagaatttggaattcacgattttgaattcagtgtttatttcaccatcacgctggcttacacgttggtatcaggcttcttctattattgaagtgagccattaagtgaattccatcttgatttgtgtctgatacagagtaataaactattttattaaatatccaaataattatacattcctccttcttacatgcaagcctaagtttgcttgtactatttcatgtggtagcaaatcaggacgcttcttgtgtctctgaaaatactctgagtaatggagtacagtcagctttcttgtaccaagaatatagggactatgtttctcccagtcattctggggataatttttgtgaaggattgcacttcataggttaagctaggtatcagttaccagtgttttttccaaataaaaaaaaaatcaggtgatatctgtaaatggttccattgtaaatattaaagaacatgatgcttaaaacagattagggaaaactatagaaggggtggggtttcggagtgctaattttgtccttgaatggtaacagctccatgtggtggtgaggtttatgttggtttgctgtttgcagatgatcttattattagaatttttcataccgaaaataaactgcattttagtttgtaaacatgcccttccagagtaatgctaccagttctttgtgaaatagctactgttgttcaaaggatgactatgtcctcttcggttgaggaaagatgacaacaaactcagtaatgacatgtaaaataggtattacaaaccaggtatggtggcatgagcctgtaatcccagctacttgagaggctaaagcaggaggatctgttgatctatggatttgaggctgtagtgtgttgtgatggcacctatgaatagcccttgcactccagcccaagcaacaaagcaagactgtctctgaatttttgttttgttttgttttttgtttttttttttttgagacagagtcttgctctgtcacccaggctgaagtgcagtggcgcgatctccactcactgcaagctccgcctcctgggttcacgccattctcctgcctcagcctcccgagtagctaggactacaggcgcccgcctccacgcccagctaaattttttgtatttttagtagagacgaggtttcactgtgttagccaggacggtcttgatctcctgaccttgtgatcctcctgcctcggcctcccaaagtgctgggattacaggcgtgagccaccgcgcccggcccctgtctctgaattttttaaaaaggcattccactcaaattaatacacattttaattgtgttttgttgtaaattacaactgaataaaaattcagcaaataagtctgttgtggtagggaaaagtctattgtgatctggaaaatataatggagaaatccagtggaagagattttatttcacattactcaaaataaaaaaatcttatacaagtctttacacttgtaacttgaaaaattctgtgctaaaatttagcttggttgctaaaatatttctctttttttctcagaagcttctttttagcatcctatagacacaagttactttttaaaatatttgcatacttgctttgcaatgtattgtttatcagtagttctatattctttgagatagtctatccagtctttctgtatttatcgtatgtctgtatagatatatattagcagataaatgagttctgaaaggggagaaatgtgattatgctaatcatgatataaagaattgactttataagcagtgttcacaggtcatacctttcccgttactgtcttacagtgaacaagaaatgatgctttgtctggtatgcatggtaaataatgccccttgctctctgcttcatgatcacatgtgatacttctaacatagatagcacatgtaaatccagtggccttgactgcaactcaagagagcattttggccaagtacaaacccactagtcatgaaaaaaaaaaaaaaaccaaatcaaagtaaattgatggtattgacatttgtctatgaaaaacaacataatatagaacaattctggggtaaaatattgatctaaaataattttaaggattaaatattgccattgtaagcatactatgagcaattatgtttgtaatgcagatatatttataattttaaatccaagatttaccttaattgtacattttcctaatttaaaaaagttattttgaaaaaaaaatcctcgaatctagagaaaggttggcaaatacatatggaactttgtaaaaaacatccagggcagcactttcactgattgcagtagcttaggagtgaaaaacaacacaactgctccaatgtatggcaatgggcaaatatcccgatttattcacagggtggcatgttaggcagtgcttagaataaatgagttggttatacaagtatcaatagggataaatgtgaaaaacacagtgttaagtttttaaaaagttgtaaaaagcacagtaggatgttatttatataaaatttaaaaacctcaaaaaccattcttctttgatatatattctaaagatgaacatatatgtaatagaagtacaaaacatacataaaataatatacactatgcagtcatttgtgtacttacttttcaaaaatatttcagtagatatagcaaacagttaacatgtaatatttggataggaggttggcaattttctttttagcacctgcctgtctgctatcattcaaactcacatttaaaatgtggctatgtgagatgagagaactataatattccaggtttgtgattagtttggaaactttttaaaagtttgaatgtggtctgagagatagtttgttataatttctgttcttttacatttgctgaggagagctttacttccaactatgtggtcaattttggaataggtgtggtgtggtgctgaaaaaaatgtatattctgttgatttggggtggagagttctgtagatgtctattaggtctgcttggtgcagagctgagttcaattcctgggtatccttgttgactttctgtctcgttgatctgtctaatgttgacagtggggtgttaaagtctcccattattaatgtgtgggagtctaagtctctttgtaggtcactcaggacttgctttatgaatctgggtgctcctgtattgggtgcataaatatttaggatagttagctcctcttgttgaattgatccctttaccattatgtaatggccttctttgtctcttttgatctttgttggtttaaagtctgttttatcagagactaggattgcaacccctgcctttttttgttttccattggcttggtagatcttcctccatccttttattttgagcctatgtgtgtctctgcacgtgagatgggtttcctgaatacagcacactgatgggtcttgactctttatccaatttgccagtctgtgtcttttaattggagcatttagtccatttatatttaaagttaatattgttatgtgtgaatttgatcctgtcattatgatgttagctggtgattttgctcattagttgatgcagtttcttcctagtctcgatggtctttacattttggcatgattttgcagtggctggtactggttgttcctttccaggtttagcgcttccttcaggagctcttttagggcaggcctggtggtgacaaaatctctcagcatttgcttgtctataaagtattttatttctccttcacttatgaagcttagtttggctggatatctctcagaccacagtgcaatcaaactagaactcaggattaagaatctcactcaaagccgctcaactacatggaaactgaacaacctgctcctgaatgactactgggtacataacgaaatgaagacagaaataaagatgttctttgaaaccaacgagaacaaagacaccacataccagaatctctgggatgcattcaaagcagtgtgtagagggaaatttatagcactaaatgcctacaagagaaagcaggaaagatccaaaattgacaccctaacatcacaattaaaagaactagaaaagcaagagcaaacacattcaaaagctagcagaaggcaagaaataactaaaatcagagcagaactgaaggaaatagagacacaaaaaacccttcaaaaaatcaatgaatccaggagctggttttttgaaaggatcaacaaaattgatagaccgctagcaagactaataaagaaaaaaagagagaagaatcaaatagacacaataaaaaatgataaaggggatatcaccaccaatcccacagaaatacaaactaccatcagagaatactacaaacacctctacgcaaataaactagaaaatctagaagaaatggatacattcctcgacacatacactctcccaagactaaaccaggaagaagttgaatctctgaatagaccaataacaggctctgaaattgtggcaataatcaatagtttaccaaccaaaaagagtccaggaccagatggattcacagccgaattctaccagaggtacaaggaggaactggtaccattccttctgaaactattccaatcaatagaaaaagagggaatcctccctaactcattttatgaggccagcatcattctgataccaaagccgggcagagacacaaccaaaaaagagaattttagaccaatatccttgatgaacattgatgcaaaaatcctcaataaaatactggcaaaccgaatccagcagcacatcaaaaagcttatccaccatgatcaagtgggcttcatccctgggatgcaaggctggttcaatatacgcaaatcaataaatgtaatccagcatataaacagagccaaagacaaaaaccacatgattatctcaatagatgcagaaaaagcctttgacaaaattcaacaacccttcatgctaaaaactctcaataaattaggtattgatgggacgtatttcaaaataataagagctatctatgacaaacccacagccaatatcatactgaatgggcaaaaactggaagcattccctttgaaaactggcacaagacagggatgccctctctcaccgctcctattcaacatagtgttggaagttctggccagggcaatcaggcaggagaaggaaataaagggtattcaattaggaaaagaggaagtcaaattgtccctgtttgcagacgacatgattgtttatctagaaaaccccatcgtctcagcccaaaatctccttaagctgataagcaacttcagcaaagtctcaggatacaaaatcaatgtacaaaaatcacaagcattcttatacaccaacaacagacaaacagagagccaaatcatgagtgaactcccattcacaattgcttcaaagagaataaaatacctaggaatccaacttacaagggatgtgaaggacctcttcaaggagaactacaaaccactgctcaaggaaataaaagaggacacaaacaaatggaagaacattccatgctcatgggtaggaagaatcaatatcgtgaaaatggccatactgcccaaggtaatttacagattcaatgccatccccatcaagctaccaatgactttcttcatagaattggaaaaaactactttaaagttcatatggaaccaaaaaagagcccgcatcgccaagtcaatcgtaagccaaaagaacaaagctggaggcatcacgctacctgacttcaaactatactacaaggctacagtaaccaaaacagcatggtactggtaccaaaacagagatatagatcaatggaacagaacagagccctcagaaataacgccgcatatctacaactatctgatctttgacaaacctgagaaaaacaagcaatggggaaaggattccctatttaataaatggtgctgggaaaactggctagccatatgtagaaagctgaaactggatcccttccttacaccttatacaaaaatcaattcaagatggattaaagatttaaacgttagacctaaaaccataaaaaccctagaagaaaacctaggtattaccattcaggacataggcgtgggcaaggacttcatgtccaaaacaccaaaagcaatggcaacaaaagccaaaattgacaaatgggatctaattaaactaaagagcttctgcaaagcaaaagaaactaccatcagagtgaacaggcaacctacaacatgggagaaaattttcgcaacctactcatctgacaaagggctaatatccagaatctacaatgaactcaaacaaatttacaagaaaaaaacaaacaaccccatcaaaaagtgggcgaaggacatgaacagacactactcaaaagaagacatttatgcagccaaaaaacacatgaagaaatgctcatcatcactggccatcagagaaatgcaaatcaaaaccactatgagatatcatctcacaccagttagaatggcaatcattaaaaagtcaggaaacaacaggtgctggagaggatgtggagaaataggaacacttttacactgttggtgggactgtaaactagttcaaccattgtggaagtcagtgtggcgattcctcagggatctagaactagaaataccatttgacccagccatcccattactgggtatatacccaaaggactataaatcatgctgctataaagacacatgcacacgtatgtttattgcggcactattcacaataggaaagacttggaaccaacccaaatgtccaacaatgatagactggattaagaaaatgtggcacatatacaccatggaatactatacagccataaaaaatgatgagttcatgtcctttgtagagacatggatgaaattggaaaccatcattctcagtaaactatcgcaagaacaaaaaaccaaacaccgcatattctcactcataggtgggaattgaacaatgagatcacatggacacaggaaggggaatatcacactctggggactgtggtggggtcgggggaggggggagggatagcattgggagatatacctaatgctagatgacacgttagtgggtgcagcgcaccagcatggcacatgtatacatatgtaactaacctgcacaatgtgcacatgtaccctaaaacttagagtataaaaaaaaaaaaaaaaaaagtttgaatgttttcttgcattcagagccttggttgacatagttaattaaaaataaaacattgtatataaagcacagaatgagcagctacacaaagctgctcaatcaatgacagctctatatgggttagggtttcttgtggggatgacattgatgtagaaagcatggtcatctattgagaatgatggggctggaggtattggatacttgaggtttagaaaatacattgtagaaaatggacaaaaacccctcaaattaagggatgaggcagaataatgcttggcaataccaggggtaggctgcagtctttcttggaaatatatattttaaatggaaccaattatcatagcatcatttcctctcagggttaccctctgatccctattttactaaatcgttataaaacaaaatgaggaattatgtgtccttcccttttgaagccaatgtaacaagatgggtaagaattagacctcctgagttcaaaatccctggattcagatctattcctgtatattcaggagaagtggtaataaattcgatggacaatttggtttagtagtcgattgaggaccctgatgaggtatatttgggaaaacataacttccgctctctctcattgactcacgggcctttgaggagtccaggagtcattggaatctggcctgaggttgaggctgctggcaaaactccttccccaaagtccattcctattgctgactgagaagggactagcattggaagtggctgattttaaataccgctagtgctggtgtgctcctccctcccattcccagctctgctttgtgtagttgccttgagaagctaagttcattctgaaaataatgccattgcacaaaacacttttgaaagttctagtttgaaattacatcaggtcacttggtctgtgtggcctcagtttcttcatctgccatgtgaaaataataatgcctactctgtagcaaagaaagtctctatagtaaacaaaaaaaaagcctactctgatactgaaagttgttatgaaaaataaaaaagggaaatgctttagaaactgttaagtgctatgtagatgttactaattaacaaaccatttcagaaactatactttttattttatggccactattcactgtttaacttaaaatacctcatatgtaaacttgtctcccactgttgctataacaaatcccaagtcttatttcaaagtaccaagatattgaaaatagtgctaagagtttcacatatggtatgaccctctatataaactcattttaagtctcctctaaagatgaaaagtcttgtgttgaaattctcagggtattttatgagaaataaatgaaatttaatttctctgtttttccccttttgtaggaagtcaccaaagcagtacagcctctcttactgggaagaatcatagcttcctatgacccggataacaaggaggaacgctctatcgcgatttatctaggcataggcttatgccttctctttattgtgaggacactgctcctacacccagccatttttggccttcatcacattggaatgcagatgagaatagctatgtttagtttgatttataagaaggtaatacttccttgcacaggccccatggcacatatattctgtatcgtacatgttttaatgtcataaattaggtagtgagctggtacaagtaagggataaatgctgaaattaatttaatatgcctattaaataaatggcaggaataattaatgctcttaattatccttgataatttaattgacttaaactgataattattgagtatcttctgtaaactgcctctgttgtagttttttttttctcctaatcatgttatcatttttttggaatccatggtttcctgttaagatgactcacacagcctacataaaagtaattgacaaaatatcatcttatagtaaaatgccacatatctttatgttcagcaagaagagtataatatatgattgttaatgataacccaaacaacaaaagatttcaccttaactggttgtcataagtagtagtatccaccgccttattttgagttggatttttatcatcctatgagccctacaaatttaaagtttttggaacagcacgtgcattgaacccataagaacctactctgcttttctgcatgtattgtccagacaagagaccaaattgccgaggcatcatttaggtgaattctaattaacatttagctaccttacaaccacaattcaaggttgtttcaaaggcatgtgcttgcatcatcctgattcactaccatgtgttactaacttggatctgcaaagtcattataaaaagctgttttgatggacttatttggatattgctttacccttcttctctcttttcttttatcaatgtaaaaacattatatgttaaatacttggcttttaagagcatagatctgaaatctgcctctagcaaataacccataacacttctaagatatacctgcaaggtcaattgtgttgtaaaaccttgataaccatactttattgttcaaaaaagccttttatgaaggcagaagttaaaaaaaaaaaacaaaaaaaacagagtccacagttatcacctcagctacaatctcatcagttcacaagtaccagcaaaacatgtgataagtcaacaaatgttttatttcaatctgaacattttacgtaagtgaagactttgttagatatcatttggaatgtggaatctacacagttggcatatcagagaaggttgaattcagtttaataaatgtttatagaaagtgcttgttatcataatgataatagctcaggatgtgcatgacaagcttttaagcgattgggtacactatctcatttgatcttctgcacaactattaatggtaggtactattatccctatcttatggataagtaaactaagatttaaaaagtacagaacatggtgtgaacactgcttcaaaatttctaaaataggtaaatcacgatctctaaactggagggttgtccaaccactagggacaatagagtactgatatttagtggtcagactgtaatgcgggaagagacaggcatgggctaaacgggtgtagagatcaaataaggggcaggttagtttgtaaacatgtccatatgtaacatttagcacaaatacaggatataggtgctttcagacccagctgcattgataaaaagttaggtggtattgtatctgtcttcctttctcaatgttgcatatctgtgttcttgcccagtttgcttcatctctctagccacacttattggcctacaatggcatcatcaccaaagaaggcaatcccatctccgtgtggctttggtttgctccctaaagtaaaccttgtgtttacttttcccaggtctcatgctttcccatatctgacctgttttgtcctcatggccaggatatgtgggacctttcctacaatgttccaaagtttgtaatagagctcttctctgctttgttccaaattctgcaacattttactttaaataatgaatttaaatacaaacaaacttgagctttgcctatacttttcaagaatgcagagataactaaattaataaaaatattcattgagtccttactgtgcacacagctctatgttaagccttgtgcagaactcaaagtcactcgagattaagcctgttactaagttatgtgcaatttagctcagtggatttcccccacttcatattgctctgataatgttttggaattaactgccttgattccttcttttctctgcttgtctatacactatttattattctacaccatctcaaattctaactcctcaagaaaatccttccagatgatttttctaaccaggagttttaacttccttttaactaccctattactttctacttccttaactcatctatcatattatatttagttatttatatactaggtcgccttgaagaagggattgtgttttcataaatcttaataatccctgaggcatcaagtacagtgatttgcatttactaaatgctcaacaaatatgtgagggattcacttgaaactaatattagataattcccagtcaaagtgatctaatagcaaatcaattcttcagttttataggcaaagtatgactctggttttccataatcataattaatttgtcaactttataattttaattaagtaaatttaattggtagataaataagtagataaaaaataatttacctgcttaactacgtttcatatagcattgcatttttctttgtaaaatttaagaattttgtattaataaacttttttacaaaagtattaattattcagttattcatcatatacttttattgacttaaaagtaattttattcaaaagagttagtataggactacatgaaaaattcaaggccaaggcttaatttcaaatttcactgcctttggctctatcttttaaaacaaaacaaaaaactcccgcacaatatcaatgggtatttaagtataatatcattctcattgtgaggagaaaaaataattatttctgcctagatgctgggaaataaaacaactagaagcatgccagtataatattgactgttgaaagaaacatttatgaacctgagaagatagtaagctagatgaatagaatataattttcattacctttacttaataatgaatgcataataactgaattagtcatattataattttacttataatatatttgtattttgtttgttgaaattatctaactttccatttttcttttagactttaaagctgtcaagccgtgttctagataaaataagtattggacaacttgttagtctcctttccaacaacctgaacaaatttgatgaagtatgtacctattgatttaatcttttaggcactattgttataaattatacaactggaaaggcggagttttcctgggtcagataatagtaattagtggttaagtcttgctcagctctagcttccctattctggaaactaagaaaggtcaattgtatagcagagcaccattctggggtctggtagaaccacccaactcaaaggcaccttagcctgttgttaataagatttttcaaaacttaattcttatcagaccttgcttctttttaaaactttaaatctgttatgtactttggccagatatgatacctgagcaattcttgttctgggttgtcttatgtgaaaaataaattcaaggtccttgggacagataatgtgttttatttatctttgcatatccattacttaaaacagcattggacccacagctggtacaaaattaattactgttgaattgagcaaatatttattctaaatgtctctgtcaaatgacagagtgtggttgtgtggattaagtccctggagagagttctttgttctctcatgttctatgctgtggttcttgctttatgcaaaaagaagtaagttacttaaaacctggacatgatacttaagatgtccaatcttgattccactgaataaaaatatgcttaaaaatgcactgacttgaaatttgttttttgggaaaaccgattctatgtgtagaatgtttaagcacattgctatgtgctccatgtaatgattacctagattttagtgtgctcagaaccacgaagtgtttgatcatataagctccttttacttgctttctttcatatatgattgttagtttctaggggtggaagatacaatgacacctgtttttgctgtgcttttattttccagggacttgcattggcacatttcgtgtggatcgctcctttgcaagtggcactcctcatggggctaatctgggagttgttacaggcgtctgccttctgtggacttggtttcctgatagtccttgccctttttcaggctgggctagggagaatgatgatgaagtacaggtagcaacctattttcataacttgaaagttttaaaaattatgttttcaaaaagcccactttagtaaaaccaggactgctctatgcatagaacagtgatcttcagtgtcattaaattttttttttttttttttttttgagacagagtctagatctgtcacccaggctggagtgcagtggcacgatcttggctcactgcactgcaacttctgcctcccaggctcaagcaattctcctgcctcagcctccggagtagctgggattagaggcgcatgccaccacacccagctaatttttgtattttagtagagacagggtttcaccaggttgcccaggctggtctcgaatgcctgacctcaggtgatccgcccacctcggcctcccaaagtactgatattacaggcatgagctaccgcgcccggcctaaaaaatactttttaagatggtgtaaatattactttctgtatcaatggtacattttttacttgtcagtctctagaatttctttataaatatgttgattcagttcatttttgtagattataaaacaggtaaaaaaggataaaacatttatgtgaattaaagggaatacctaatttttgtgtagagtttattagcttttactactctggtttatggatcatcacaccagagccttagttactttgtgttacagaataactaatatgagtgaatgaatgacttacacaagtcactgcttaggataaagggcttgagtttgtcagctagagtatgacagaaagtatctaagttttggagtcaaatagcactttgtttgaatcccagattgcatgcttactagttatgtgaccttagtcaagccacttcacctcactgagtctttgcttttttcatctctaaaatagagatacccaccgctcataggctgtcataagggatagagatagcatatggaatgagtctgtacagcgtctggcacataggaggcatttaccaaacagtagttattatttttgttaccatctatttgataataaaataatgcccatctgttgaataaaagaaatatgacttaaaaccttgagcagttcttaatagataatttgacttgtttttactattagattgattgattgattgattgattgatttacagagatcagagagctgggaagatcagtgaaagacttgtgattacctcagaaatgattgaaaatatccaatctgttaaggcatactgctgggaagaagcaatggaaaaaatgattgaaaacttaagacagtaagttgttccaataatttcaatattgttagtaattctgtccttaattttttaaaaatatgtttatcatggtagacttccacctcatatttgatgtttgtgacaatcaaatgattgcatttaagttctgtcaatattcatgcattagttgcacaaattcactttcatgggctgtagttttatgtagttggtccagggtgttattttatgctgcaagtatattatactgatacgttattaaagaatttcctacatatgttcactgctgctcaatacatttatttcgttaaaacaattatcaagatactgaaggctgattggtaactcacatggaactgggagagtatacaattctgaaccaaatagatgattctctattattatatcttaatttatgtgttatggtatattaaacatgaaaaaaattgtatttggttagaatatgtttgctcttccttaactcgggaatgacatagggtaatattcacagattgggttcctataaatcctccacttgaagtgaagtcagttcaagtaatgaaagctacctcctgagatagaatcagtacttggcacctatctctagtgttctttcacctcatataacctttcactgattagtaaagattatatccaacaaagaaagtacagcacagactgagatatgattactgagataaatttgggcaaaatataaactacagcatttctgtagcaatgagaccatttttcttcagttgagctccatgttctacaaacttcaatcaaaaaaggttctaggagactcagtgaaagttgatacactgttcaaggaacaaataatttcagcacatgggaatttcacagggaaaaatatactaaaaagagaggtaccattttggatggtgtcaatatgggttatgaggaattcaggctgctgagtccagtgtacaatggaaactgagctgcaggtgtgtgattgtaacaacaaaagaaatgctgaaatattaagtcctttgccatgtaaatagaaaaagagtatttatttcccaaacattattgctcacctgtttttgttatgcctttcaagataaatccaggaaaggaattgcattttctttccagaaaacaagttcttgggggaattgttcaattggtagatgttgtttttctcattaacaagtgagtgctccatcacacttgctgagtgctccatcacacttgctctctgcattactcctctgcctgcaaacacatatatagcaagggtgatgacaaggatatcagagggtctggttttctcaaactcatgataaactcatggctgggtcattcttggtgctgattttactttgttttttgttgttattgttccctcttcctcaaaagatgaaatctatccctcttacttggaatttctctttgatatatagcgaatgtttggttgtaacctgtataatctggcatgaaattgtcactcgaaaaggctagaagtgttgacataaatatgggacagcaagagttgctcctactcaagagagcaaatataatgttctggaagagattggcagaattcacatcaaaggagtgattacttcagcctgggccactgttgtactggtcaaaaggctgtgcaaagctctctgaaaatccactcttttattgctctttagtaataaagtcactttcaattttaaaaataacaaactgatatatttttatgactcataaaatgttagcaattatattatggagaatctactttctgggtgattcttacaaatgttcttggatctatttttttttcttatagtacctattcttcccatttttctcagctctagttaatatatttcaacaacagttcaacaaatttaacatttttataaaaagtgtttcctatcattttataaataccagcctagtccatgttattccttttcttgttgaggagaaaggacacacattgtaaattcaaatatagacctctactgtgctatttaatcttggtaacaactccacaaaggagatgacatgttttccttctatagaggtagattctgtaaagttagagggaagagtgacttgcttaagatggcataagctgtaactggcagaaccaggattcaaagccaggtgggatgccaaaatcataatctgtcttcagtgtcaagttactgaaattggtaaacattagacctaaatagacggaattgcaatccgggttgggcacattaaactccattttcttcatcaatgtgctcagattacattttacttttcaggctaaaaatggaaaaaaagagtccctcttagttctgcacttgagaatgagaatagcttttctgaattatacaaggaagaagaactaatgcccaaatgccaggtacccacatgcactatgccatggcacagctgttgccccctttcaccagagccctctctctgtatcctggttgacctttccttgggcaagagctgggtggggaggatcacaagtgactccaatttggatggcttcgggaagactgggaccgagctgaaggcagtgttgtcctctgcactccctgttttctgtctgctggagcactgaagcctcacatatgtattaaaaaaataatttccatttgcatttcagactagaagattgaacgtatagtgtaatgtgattgcaaataattatattgaaatgagacagagaggatgtagtatctactgtcataatttttcaaaacccacctgcaacttgaattaaaagaaccacttgggtttttttttttgtttcaaacgcaaatcctggaaacctactgagactcattcagtcagtatctctaagaggcaagcttgagactgtatatttaaaaagcatctcaggtgatttttacacatgctaaggcttaagaaccacttctctgtagcttatatgttattttcaatgttcctcaaagccaagttagaatttccaaagtgttaagaatccattagacaatcacagaattgtctttttcctttataaatcttgcaatgttgttctcatttccatacttaattacttaaaacaccaaccaaccaacaagcaaaaaatgattagtctaactaatattacaagttaataatgaagtaaaggtttaaaaataatgtcataataatgttaataacaaattattaattataatttaaaaataatatttataatttaaaaataatatttacaagtactacaagcaaaacactggtactttcattgttatcttttcatataaggtaactgaggcccagagagattaaataacatgcccaaggtcacacaggtcatatgatgtggagccaggttaaaaatataggcagaaagactctagagaccatgctcagatcttccattccaagatccctgatatttgaaaaataaaataacatcctgaattttattgttattgttttttatagaacagaactgaaactgactcggaaggcagcctatgtgagatacttcaatagctcagccttcttcttctcagggttctttgtggtgtttttatctgtgcttccctatgcactaatcaaaggaatcatcctccggaaaatattcaccaccatctcattctgcattgttctgcgcatggcggtcactcggcaatttccctgggctgtacaaacatggtatgactctcttggagcaataaacaaaatacaggtaatgtaccataatgctgcattatatactatgatttaaataatcagtcaatagatcagttctaatgaactttgcaaaaatgtgcgaaaagatagaaaaagaaatttccttcactaggaagttataaaagttgccagctaatactaggaatgttcaccttaaacttttcctagcatttctctggacagtatgatggatgagagtggcattttatgccaaattaccttaaaatcccaataatactgatgtagctagcagctttgagaaattctaaagttttcaagtgataagactcaatttatacaaagctaattggataaacttgtatatgattaagaagcaaataaatacttattatgcttttttgctgtttatttaaatatttaacccagaaaataagtcactgtgacagaaataaaaatgagagagaagggtgagccactcttaggtagttctggcattatttaatctaggccagaggttgcaaatggtgtcccatagaactaattttggctcctagacctgtcttatttaacctttcatttaaaaaatttgtattggttgccagcaattaaaaattgggagatgtctcacacacacacacacataaacacacacactcatgtgtgcagcctcttttgaagaattggaataactagtcaactgcgtcctccttttccacaagctgtgacagctccctgctcacagagcacctgccctctcctgttcatcatgctctcttctcagtcccattccttcattatatcacctatttggtcctgagactaagtgagtttgagatctgtgatttagacaaagtggtgaatctagctctgaatcatagtaagtagctctgggaatcatcttgtcttctgttagcccattgagagagaaatagagagagagagagagagaaagaaagaagaagaaacagatctggggagagtcactgaatgggagcatagagacagagaaacagatctagaaaaccaaactgggagaaaatgagagaaaccaaaagagaggtagagaggagcagagaagaaaatgaagaagcaaggcaaggaccaggctttttcattatttcttatggccaagacttcagtatgcgtggacttaattcttccttatgctcctaccttccctagggaaactgatttggagtctctaatagagcccttcttttagaatcacagtttgatgccttaaaactagttatataccttcacatgcttccttaacccacagaagtgatgctaatgaggcccttaataaggagcgtgctattaagatgaagacattcattttttttctccgtccaatgttggattaaggcacattagtgggtaattcagggttgctttgtaaattcatcactaaggttagcatgtaatagtacaaggaagaatcagttgtatgttaaatctaatgtataaaaagttttataaaatatcatatgtttagagagtatatttcaaatatgatgaatcctagtgcttggcaaattaactttagaacactaataaaattattttattaagaaataattactatttcattattaaaattcatatataagatgtagcacaatgagagtataaagtagatgtaataatgcattaatgctattctgattctataatatgtttttgctctcttttataaataggatttcttacaaaagcaagaatataagacattggaatataacttaacgactacagaagtagtgatggagaatgtaacagccttctgggaggaggtcagaatttttaaaaaattgtttgctctaaacacctaactgttttcttctttgtgaatatggatttcatcctaatggcgaataaaattagaatgatgatataactggtagaactggaaggaggatcactcacttattttctagattaagaagtagaggaatggccaggtgctcatggttgtaatcccagcactttgggagaccaaggcgggtggatcacctgaggtcaggagttcaagaccagcctggccaacatggtaaaacccggtctctactaaaaatacaaaaaattaactgggcatggtggcagatgctgtagtcccagctgctcgggaggctgaggcaggagaatcacttgaacctgggaggcggaggttgcagtgagctaagatcacgccactgcactccagcctgggcaacaaggcgagactctgtctgaaaaagaaaaaaaaataaaaataaaaataaaaagaagtggaggaatattaaatgcaatataaaagctttttttatttttaagtcatacaatttgtttcacataacagatcaggaaataatacagagatcataagttttggagctgggtttgaatcctggctctgccatttactttctgtgtaatctaagtcaagttactgaactttgtgggccctctggctctccatgtgtaaaatggagaatattaatatttaccttgcaagtttgttgtgaagactgaaggagagaatttaggtaaaacattcatcagagtaccatgcacacagttgttcctcaataaacattagcttctctgattgcaagttccagtctaaagtgctttatatataccagccaataaaaggatgcgagagagatataccagtgtattgttttctaccattttaaacctattttcatccactgttacaaattctatcatactgctccacataaaaaatattatcaatgatttttagtctctgaagtgcaatatttgattattgagcacacctgttgaagttttagtttcttctcacttacatgggttgtgtaaaggtaggaggtataaaaccagtgtcctaggtctaaatctttcttaatgtcatactttggattcattgatataagtaacttgagcaccagcgcttcattttacttcattttttaaagatatagtaagagtaattcccatctgcctagcaaaattgttttgtagaaaagtttgtggatcagatttattttactttgattttaggaatttcaagtgtcttcgtcggcatgaaggaaaaatatgcagtttgacattttctactactttcaggtcattattttcctactctggtgcaaaaaccctcaattcctgtctcactccatctaatcaaataggtagcatgcttgagcccttactatgtgccaggcactaggataagcactttatatgttttgtcccaattaattctcacagcatttctatgacctaaataaaattaatattttcatttcaccaataataaaatggaggcttcaaaaagtttagggacttggctcagctcacacaactggcaaggactgaaaatggattttagtcccaaatgtcataggctagagccctttcactaaactgttgtcttccatctggtggcatcctcttcctccagtctttgtcacctaaactctgggcaccccttgatggcatttacttatgatggtgatgcttgttaaacttcctgtttgcgacttcaacgtccatataaatgagtcttccaatactgtacttagaacttatattttgtagtgacttctttaaaagctttctctcttagtcatatcctgagttttgttagcacctggacttaccttactttggaaatgttgcactctgaaatctctttctcagcttggaatttcctaatcttccaactgtttgagtcttttaattctacatttactgcctttccatttcatcaggatttctagtctctttaattcttccttttgaactcctcctgatttaacctctgcttattcgaagaacaataattttattctctcagctgcactctcaattcccttttccttttggtgatttttctttttcctacagaacacttactttatcagttttggagaaggaagtgctatctgggtaacagtagtgctatctgttgactctagtcaactgtaagttttatacatttattgtttaaaccttatatgggtctataatccttcttgggaaatcctttcatttgtctttaatttcctttaccatttccctaaaggctattccagatttttatcacattcacaaaattcccgtcttttctcaggatctgttcacccccagtagatagccttgtctcccacaatacatggagaaaatagaggccaccgtcatatttgaatgtttccaacttctctcttcacctttggaattatctttttcttcttttgtgtctaagagaaagatgtatacttcttcttacccttgtctgaactactctattttgcttcatcttctcagaacaggggaccagcaattattcttcctccagaagcttcaacatcttttgtcaactgactccttctcatgtttaaatattttcaagttaaacaatttctttcctgactttcgctcacgcaacctcatgcccaaaaccttatcactcttcttccctttgctgtcaaggctgttctcacttcttcactttttgtggacttctccccactacaacatagattctgctatcaccaatctattaaaactgttatactcttgtggaatttatcatttaatttagcttcagtgaaccgttctttccagattattttggcctcagaccatgacttctaagtctgccgtgcttgccacttaagtgatgatgggccagtgggtccccacctaggcctctgtgttagtctgttttcatgttgctgataaagacatacccaagaatgggcaatttacagaagaaaggggtttgagggactcacagttccatgtgactggggaggcctcacaatcatggtggatgatgaaaggcatgtctcacatggaggcagataagagcatagaacttgtgcagggaaacttccctttattaaaccaccaggtcttgtgagacttcttcactatcacgagaataggatgggcaagaccctcccccatgattcaattatctcccactgggtccctcccacaacacatgggaattatgggagctataattcaagatgagatttgggtgaggacatagccaaaccatatcagcctccttctggctttttatgttctccgtgggtgacctctctcaggctcaagtgataaccaatgtgctgatgactctcaaatgcgcatctctggcttcagtttcttccttgaacttcatacatatgtttccaaatttcctgcgtgtacctcaaggttcttgttcatcacttcccaagcttcataaacgcactcattttagtgtattctctgtctcctttgatagcatccctgagaggcaagtccctggtgagttatatacaactcctcccttgctccaaacctgagagtaagtaacattcctattaacatattaggaagctgaggcttagacagtttaagtaactcaagcatggttacacaactagctagggcagagctaaaatgtcaggctaggcttctgtgactccaaagccctttctcacttagcatatcatcacttatttttttttttaatcacatatatgatttttttttctttaagagatagaatcttgctctatcacgtgggctggagtgcagtggcacaatcatagctcactgtaaccttgaacttgggctcaagtgatcctcctgccttagcctactgagtagctagggctacagacacacaccaccatgcctagctaattttattttattttattttattttttgagacagagtctcactctgtcacccaggctggagtgcagtggtgcgatcttggctcactggaacctctgctgcccgggttcaagcgattctcctgcctcagcctcctgagtagctgggattacaggtgcctgccactgtgcccagctaatttttgtatttttagtagagacggggtttcaccatcttggccaggcttgtcttgaactcctgacctcgtgatccactcgcctcggcctcccaaagtgctgggattacaggtgtgagccaccacgcctggccacctacctaatttttaatttttttgtagagacagggtctcactacgttgcccaggctggtcttgaactcctgttctcaaacaatcctcctgcctcggacaccccaagtgcagggattacaggcatgagtcattgcagctgacctgtatatatgatttttagtatatgtaaatatacatatttattaaatgtaaatataaatataaatgtgtggagtgatatccattgaaatgttaaacatagttctcagtggtacaactacaggtgatttctcttttcttatttctggttttctgtgttttccaaatttcttgaaatgtgtcttctgtaatcagaaataaaagttattagtaacaacagtcttccactggtacaagtgcttattggataaaagtcccacttctaagcatgatactcacaacttttaggttaatagcctttgtcaccttgccatatacatctgatccagccactcacaccattcctgagatatattttgttcctttgtgcctaaatcattgtgcatgcagatccatcttcctggaacacctataaccatttcttagtcctgtgaaatcctacttacatccttcatagcctagcatgtatgtcatttatttggtcaagggtgagttggttgttctcttgaatgtactgccatatgacgtggtgtgatttcaattgtagcaccaagctcattgcaatattaattcgtttgtcattctcccatgtaggatgtttgaagtagtttctaacacagagattatactcaataaatatttattagataaataaatgaataagggaataacaaatgcctttgtctcattttaaaatactttcattgttagctacccatataataaaaaactaaaagcagtagttttcaagcatgattgtttatgtatgccttaaaagaattttgaaaacctatgtacccctgacacacttttaagttaacttataaatttttcaacatagttttaagtggtggcaaatgatgtagtttcttgtgtattttaaactgcttaagtatgctatacatggatttcttcaaaaccctgaagctgcagtttcagtgcattcaatttatggaaaagaaattaatttataaaattggttcttattgtcaagtcaatcagctaaatataacttgctttctgtcaggaaaagtctgactttaaaatacagataagtaataactattattaattaattaaattattaaaattaaaataattaaataatttgttaattaaaatgccttattcccctacttatttctgcaatttgactctaagaatagataggacatgtagattgccttaggtttgaaatctgggtgaaataagatactgcctccttcagtatttctgcctttgcttttatgggagcctctttcaagaaaaagtcattctctcatggtccctttgtttgagtcccagaggttttcctactccagaaagtgcaacgtagtgagactagtactatactcccttgcatggtaagtgagaaggctgtctgtataaaatgagggaaggactcatgagagggaagtaggtcaggagaaatgataggttctcaggcaggttaattttaggaaagagtgaatagagtcccttaaaacaaggtgcatctgcttcctcctgatcaatctttaggactgtttactttgatttgaagaccactatgctaaagcttcccacgggggcaatagtgaggcaaggaatttttaaaagggaattacttcttcgtagctacttttgtgaaatgaattcatttgaattatctggcaatctcttcatatttatattcaacaataattacttaaagaaatgctttgagcttctcagaggagggtgctaccagtgtgatggagtagaattcagatttgggtagtgactttaaagctgtgtgactttagtcatttaactgctgagtcacagtctacagctttgaaagaggaggattataaaatctatctcatgttaatgctgaagattaaataatagtgtttatgtaccccgcttataggagaagagggtgtgtgtgtgtgtgtgtgtgtgtgtgtgtgtatgtgtatgtatacatgtatgtattcagtctttactgaaattaaaaaatctttaacttgataatgggcaaatatcttagttttagatcatgtcctctagaaaccgtatgctatataattatgtactataaagtaataatgtatacagtgtaatggatcatgggccatgtgcttttcaaactaattgtacataaaacaagcatctattgaaaatatctgacaaactcatcttttatttttgatgtgtgtgtgtgtgtgtgtgtgtttttttaacagggatttggggaattatttgagaaagcaaaacaaaacaataacaatagaaaaacttctaatggtgatgacagcctcttcttcagtaatttctcacttcttggtactcctgtcctgaaagatattaatttcaagatagaaagaggacagttgttggcggttgctggatccactggagcaggcaaggtagttcttttgttcttcactattaagaacttaatttggtgtccatgtctctttttttttctagtttgtagtgctggaaggtatttttggagaaattcttacatgagcattaggagaatgtatgggtgtagtgtcttgtataatagaaattgttccactgataatttactctagttttttatttcctcatattattttcagtggctttttcttccacatctttatattttgcaccacattcaacactgtatcttgcacatggcgagcattcaataactttattgaataaacaaatcatccattttatccattcttaaccagaacagacattttttcagagctggtccaggaaaatcatgacttacattttgccttagtaaccacataaacaaaaggtctccatttttgttaacattacaattttcagaatagatttagatttgcttatgatatattataaggaaaaattatttagtgggatagttttttgaggaaatacataggaatgttaatttattcagtggtcatcctcttctccatatcccaccctaagaacaacttaacctggcatatttggagatacatctgaaaaaatagtagattagaaagaaaaaacagcaaaaggaccaaaactttattgtcaggagaagactttgtagtgatcttcaagaatataacccattgtgtagataatggtaaaaacttgctctcttttaactattgaggaaataaatttaaagacatgaaagaatcaaattagagatgagaaagagctttctagtattagaatgggctaaagggcaataggtatttgcttcagaagtctataaaatggttccttgttcccatttgattgtcattttagctgtggtactttgtagaaatgtgagaaaaagtttagtggtctcttgaagcttttcaaaatactttctagaattataccgaataatctaagacaaacagaaaaagaaagagaggaaggaagaaagaaggaaatgaggaagaaaggaagtaggaggaaggaaggaaggaaagaaggaaggaagtaagagggaagcagtgctgctgctgtaggtaaaaatgttaatgaaaatagaaattaagaaagactcctgaaaggcaattatttatcaatatctaagatgaggagaaccatattttgaagaattgaatatgagacttgggaaacaaaatgccacaaaaaatttccactcaataaatttggtgtcaggctgggtgcagtggctcacacttgtaatcctagcacttttggaggcagaggcaggtgaattgcttgagtccaggagtttgagaccagcgtgggcaacatggcaaaccccacctctacaaaaaacacaaacaaaagaaaatagctgggtgtggtggtgtgtgcctgtagtcccagctacttgggaggctgaggtgggaggatcacctgagcctgagaagtggaggctgcagtgagccatgattgcaccactgtaccctagcctaggtgataggctcaaaaaaaaaaaaaattggtgtttgcaatgctaataatacaatttggttgtttctctctccagttgttttcctacatacgaaacagcttttaaaacaaaatagctggaattgtgcattttttcttacaaaaacattttctttcttaaaatgttattatttttcttttatatcttgtatattattactagcagtgttcactattaaaaaattatactataggaggggctgatactaaataagttagcaatggtctaaacaaggatgtttatttatgaaaaggtagtaattgtgtttcatagaatttttaaaattaattctgcgtatgtcttcaagatcaattctatgatagatgtgcaaaaatagctttggaattacaaattccaagacttactggcaattaaatttcaggcagttttattaaaattgatgagcagataattactggctgacagtgcagttatagcttatgaaaagcagctatgaaggcagagttagaggaaggcagtggtcccttgggaatatttaaacacttctgagaaacggagtttactaactcaatctaggaggctgccttttagtagtattaggaatggaacactttatagttttttttggacaaaagatctagctaaaatataagattgaataattgaaaatattaacattttaagttaaatcttacccactcaatacaatttggtaatttgtatcagaagcttaaaagataacctaatagttcttctacttctataacttacccaaatatgtttgcagagatcttatgtaaagctcttcattataacactgctttcaggagccaaaaattgggtgggggagccccataaatgttgaataataggggtttgattagataaattttggtgtagttctataatggcgtgttattcagccaataaaaggtttgttaaagaatgactgtgacggatgtatatgatatactcttaagtgaataaagagttacaaaatgttatgtacaagttacaaaatgtatgtacattatgatccatttttcataaaatcatatgtatgtatatatgtgtgtctggaaggataaatttatcaagttgttatctctgaaattttgggtatattttatatttctagattttctgttactttgttactttactgataaagtaataacgttgttgacttttgtcactctcccctattaataatcatctaggctgcaaaaggatcatgtcttctttatttttatattccaaggactgtcaacaagtgcctagcacttgacaggtatattatagaaatttaactgaatatctttaggaaatagatttttgtttgtagttgttctagtctacattaaatgtcttgcgcttatgaaacttccttgaattattttagtgaagcaatattagtatagaattttgcatcactggatgcccttgactgaaagctggcttatggcatctcaccagtgtgtggggagtttcagtccttctgttgtctgcatcacagctgaagcagtgctgttgctgacaattcctgacaccaccttgtctctattattgatcattgcctcactatggtactgagttttagcttattcttgtaataactgggactcatatgtatagaataagctattagctcacgtttttgcttgctttttatacagaatacatgtctgcaaatagttttatcaatattttggaattttgggagatatgaagttaaaaacatcattgaatatatatatatacacacacacatatatatatgacactatacatgatttattttatttaatttttaaaattttattctttttagagattaggtcttactctgtcacccaggctgaacttcagtggtgtgatcatagctcactgtaaccttgaactcctgggctcaattgacctttccgcttcagcctcccaaagtgctgggtttataggcatgagccactgtgtctggtccaatatgcatatatatatttttaacctggattatcagagctatattgtgtttaggtttataaagctgtactatgtgaaaatatcacttctaggtttaattttgtacaaaggaattttatatagaaatgaggtaattcagattttttcccatgtaataagaattgtaaaatttactgaaacaaacatcaaaaagatatctgttacatgaccttcctttcttttgaatatatttcaggtgatattatttattaaaatttaaaaatgaaaattaaaatatataaaaagttgaaaattattcctttctttactgtctctcatctgtccattttccattctcctgcattccctcatccaaccaaggtagccaatccaggtaactttttttagtatcttcccagagatgtttctctctatatatataatcaatatacattttttattattccccacctctctttttatgtaacaatatgcagagttttgcttcttgcttttcccactatcttggacaactttccatattcaaagcacagaggacttgcacatatgttcagactgctgaatatttctgtctctcccctgccattcatatgttgaaatcctaattcccaaggtgatggtattgcagggtggggcctttgggaggtgattagtccatgagggtgaagtctttagtaaatgagattagtgtctttataaaagaaaccttagagagaccctcacaccttagagagaccctcacccctttctgccatgtgagaacacagcaggaagacagctggctatccaggattcaggagtctcttagcagacccaaatctgctggcaccttgatcttggacttcccagcctccagaactgtgagaaataaattcctgttgtttataagccacacagttcatggtattttgttatagcagcctgaacaaggacacacacacacacacacacacatgcacacacatttaaatagatgcatagtattctatcatatggatggatattctatgatataatgaatcactattgattgacatttgggttgtttccaatattttgttaacacaaagaacaacactacaaataactttatatacatatcatttagcacatctgcaattgtatcagtaggcttcctataagtggtcaagcatttgtgtacttgtgattttggtagatgttgtcaaatgtccttccctgaaatttgtaccaattcgtactcatgccatacactctaaatagagtgctgatttccccacagcattactaacagatgatattatctaatttaaaaagtttctcatcttatagggaaaatagtatgtcaatgtattcttaacttgcatttcttttattataagtagtgtaaaatatcatttcaacttatacacaggaggaatttctctctatataaagtgatcctagaatcataatgaaaaatatcaccaactcattaggaaaatgtacaaaggattgaatagatatctcatcaaaaataaaaatataagtggcctttaaacattgaaaggtaacatttgaacaaagacttgcaggaggtgagggattagggaatgcagactctgggaagagtcttccaagtagcaggtgaagcaagtgcaaagctttcagatgggactgactatacctgtctggtttgaagaacagtaaggaggtcactgaggctggcatagagtaagacagggagggtagaatactgtcagagaagtaatcggcggtggaggtagggggtaaaccataaagtgctcgtaaagactaaggcttatttctctgggtgagattagaggccactggagagttttaaacagaagtaacagggccactttggctaatgtttttaggctattctgtagggagacaagggaggaagcaaggagatgagttaggagtctattgtgccagttcaggcaagtgatgatggtggcttgatccaggtagtagtggaagtagtatagtaggaagtgatcagattcaggacatgctttgaaggaagatccaataggattaatggataagttgaacaatggcatatgagaaaagtcacagaggagtcaaagatgattccaagctttctggactgagtaactggaaggataaatgtgccgtttactagaaagataatgggagaaacaggttttggatggagcttggtttgggaatattaagtttgaaatgcctatttgacatccaaatagagatgttagttggatgtacaagtctagtttcaaggaagagggggctggtagtgtgaagatggggctggataagattctaaaggaaagagggttgataagaagagaaaggggtgtaggggttagcctaagggcattctaagtattagaggttaaggaggtgggtgaagaaaacccaataaaataaaagtctgagaagacaaagctagtgaatgaatgtggtatcccggaacccaactgatgtcaagcagaagggtgttatcaactaggtcaaatgctcattcatcaagtaagatgaaactgttataattaaccggtgtcttctgaaatacggagataactcgtgacttaatgaaagcaatagtagagaaggtcaaacttgaccagaatgaaattagaaagaataagaggaaagaaaagaccaaatacagacaaccattgatgccttattcttttgatatactcctggagtccacttgctaatacaattgacccttaaacaatacaggcttgaactgcatgggtccacttatttgtgaattttttttcagttaatacattggaaaatttttggggttttttgacaatttgaaaaaactcacaaactgtctagcctagaaataccgagaaaattaagaaaaagtaagatatgccatgaatgcataaaatatatgtagacactagcctattttatcatttgctactataaaatatacacaatctattataaaaagttaaaatttatcaaaacttaacacacactaacacctaccctacctggcaccattcacagtaaagagaaatgtaaataaacataaaaatgtagtattaaaccataatggcataaaactaattgtagtacatatggtactactgtaataatttggaagccacttcctgttgctattacggtaagctcaagcattgtggatagccatttaaaacaccacgtgatgctaatcatctccgtgtgagcagttctctctccagtaaattgcatattgcagtaaaaagtgatctctagtggttctcgcatatttttcatcatgtttagtgcaatgccataaaccttgaataacatcaagcaatccatacaaagtgccactagtgatgcacggaaaagttgtaacagtacaagaaaaaagttgagttgcttggtatttaccatatattgaggtctgcagctacagttgcctgcaatttcgagataaatgaacccagtataaagactgttgtaacaaaagaaaagaaaatgtgaaaccatcagtgcagctatgccagcaggtgtgaagtcttgcactttttgcaaaatacaaaatatgaaatatgtgttaattgactgtttatgttatctgtaaggtttccactcaacaataggctattagtagttaagtttttgtggagtcaaaaattatacgtggatttttgactatacagtgggttggcacccctaaccttcatgttgataaagggtcaatggtatattatttaatttttttgtatttatattcataaataagattaaatctatatttccaagtaatctctataagattttgttattaatattactattatttttgagacagagtcttactgtcaccaggctggagcacagtggtgcgatctcggctcactgcaacctctgcctcccgggctcaagcaattctcctgcctcaccctcccaagtagctgggactacaggcacgcacaaccacactcagctaatttttgtatttttagtagagacggggtttcaccatgttggccaggatggtattgatctcttgacctcatgatctgcctgcctcggcctcccaaagtgttgggattacaggcatgagccactgtgcacagccattaatattattgttacccaataaaaaaaatttggaaacttgtcttcttttcccctgattctgtttaaatagcactggagttacctgttttgaattttttttccaagcggtcccttatgagttttctctatgttttatttgtttcatttctttttttttttttttttttttttttgagacggagtctcgctctgtcgcccaggctggagtgcagtggcgggatctcggctcactgcaagctccgcctcccgggttcacgccattctcctgcctcagcctcccaagtagctgggactacaggcgcccgccactacgcccggctaattttttgtatttttagtagagacggggtttcaccgttttagccgggatggtctcgatctcctgacctcgtgatccgcccgcctcggcctcccaaagtgctgggattacaggcgtgagccaccgcgcccggcctgtttcatttcttatatcgtatttttgcaactcctttattgatacttttcttcctgattaggtttctactaaaaccaaacaagctttccatgaattagcttttagatttacttattagtttaactgttctgttgtattgtaactcattaatttataattttatctttattaattattctatttttcttcgcttttttgttgtttttctagtttttgagttagatgtttgacgcttttttaaaaagctgtgcattttcctctgggtaatactttagctgtatattatgtattctgatatatagtgtttccattacattgttttctagaaaatctgtagctttgatttatatttgtttcctctttgacctaagatatcctaagggaaaatttaacattttccagaaagaaaacaaattttctttgttttccaagaatgttgttcaaattatttctactgcttggaatttttatcatttttgtgtatccagtaaatagtcaatatttgtacttgctctctgaccacataaaagaatatattcgtgtagtttctattaatagattagagttcaattcagatattaaatgtacatcattattcatgatatttaggtcttctacatcttcacttatcttttttctacttgctttgccattaacagataaagttgaattaaaggcttctactacatacatttctccctgttattccttataggttctgtaatttttgcttcaagaatattgctttttaaatttaatatatagatacttataattacactctagcattataaagagccttttctttttcattgaatgtatttgggcctgcatatgtctaacatgaaaattatagtcctttttttgtttctttgtttgtatttacagttttaagttccattttcaacctttatgcactctttgctttaggtgtgtctcttttagttagcataaagttaggtttgtctttaatttcacctgaagtcttttcctcttaatagatgggttaagccaactgaaaaataaaactgacttatatacttttatttcaagtatgtcctccacaaatattttttgaatagattagcttatatactttggaatttgttaaaaaaagatttttataaaaaataattgtggtgaaatgtacataacataaaatttatcattttgaccatttttaagggcatagctctgtggcataaagtatactcacatagttgtgcaactatcacctccttttgatttttttttactaattttgtaaatttgtttcatctgagctgtcttattatgttttgttttatgtttttctttcctttattatgaagtcactgtattgtctgtaggctatatgtatctgtgagtgtgtgtgtatatgtgtgtattatggtttttaaaaaagtctatatttgttttccagtggctatacttaatactaataactttatgttaaatttttcattctatgtgactctagttcactaatatgagctctgataaaatcagtgctttttcgaggttaggagatcaagaccatcctggctaacacagtgaaactccgtctctactaaaaatacaaaaaattagccagacgtgatggcgggtgcccgtagtcccagctactcgggaggctgaggcaggagaatggcgtgaacccaggaggcagaacttgcagtgagccgagatcgcgccactgcactctagcctgggtgacagagtgagactctgtctctaaataaataaataaataaataaataaataaataaaatcagtgctttttcttcctctgctacctcctttccttctactcagttttagtcagtagtattatcttttttcagatttatctttgtattgttaaatctgcttatgcttctattactttatttattagctttaaatgataccttttgactttcagcttttcttaataaagcaatcagcaaatttcctttacactccacacttataccccatttcctttgtttgtttatttggtttttacttctaacttttcttattgtcaggacatataacatatttaaactttgtttttcaactcgaattctgccattagttttaatttttgttcacagttatataaatctttgttcactgatagtccttttgtactatcatctcttaaatgactttatactccaagaaaggctcatgggaacaatattacctgaatatgtctctattacttaatctgtacctaataatatgaaggtaatctactttgtaggatttctgtgaagattaaataaattaatatagttaaagcacatagaacagcactcgacacagagtgagcacttggcaactgttagctgttactaacctttcccattcttcctccaaacctattccaactatctgaatcatgtgccccttctctgtgaacctctatcataatacttgtcacactgtattgtaattgtctcttttactttcccttgtatcttttgtgcatagcagagtacctgaaacaggaagtattttaaatattttgaatcaaatgagttaatagaatctttacaaataagaatatacacttctgcttaggatgataattggaggcaagtgaatcctgagcgtgatttgataatgacctaataatgatgggttttatttccagacttcacttctaatggtgattatgggagaactggagccttcagagggtaaaattaagcacagtggaagaatttcattctgttctcagttttcctggattatgcctggcaccattaaagaaaatatcatctttggtgtttcctatgatgaatatagatacagaagcgtcatcaaagcatgccaactagaagaggtaagaaactatgtgaaaactttttgattatgcatatgaacccttcacactacccaaattatatatttggctccatattcaatcggttagtctacatatatttatgtttcctctatgggtaagctactgtgaatggatcaattaataaaacacatgacctatgctttaagaagcttgcaaacacatgaaataaatgcaatttattttttaaataatgggttcatttgatcacaataaatgcattttatgaaatggtgagaattttgttcactcattagtgagacaaacgtcctcaatggttatttatatggcatgcatataagtgatatgtggtatctttttaaaagataccacaaaatatgcatctttaaaaatatactccaaaaattattaagattattttaataattttaataatactatagcctaatggaatgagcattgatctgccagcagagaattagaggggtaaaattgtgaagatattgtatccctggctttgaacaaataccatataacttctagtgactgcaattctttgatgcagaggcaaaatgaagatgatgtcattactcatttcacaacaatattggagaatgagctaattatctgaaaattacatgaagtattccaagagaaaccagtatatggatcttgtgctgttcactatgtaaattgtgtgatggtgggttcagtagttattgctgtaaatgttagggcagggaatatgttactatgaagtttattgacagtatactccaaatagtgtttgtgattcaaaagcaatatctttgatagttggcatttgcaattcctttatataatcttttatgaaaaaaattgcagagaaagtaaaatgtagcttaaaatacagtatccaaaaaaatggaaaagggcaaaccgtggattagatagaaatggcaattcttataaaaagggttgcatgcttacatgaatggctttccatgtatatactcagtcattcaacagttttttttttagagccccattcttattttttatacactttgagagcataatgaaaagaaaagctacctgcaaaagttttggacttacctcaaagaggatatacttcattcctcaaaaggccttcttccaggaatagtatttcataacctggaggttggaaaaatctggatttgttacaaaaaaatctgagtgtttctagcggacacagatatttgtctaggaggggactaggttgtagcagtggtagtgccttacaagataaatcatgggctttatttacttacgagtggaaaagttgcggaaggtgccttacagactttttttttgcgttaagtatgtgttttcccataggaattaatttataaatggtggtttgatttcctcaagtcaacctttaaaagtatatttagccaaaatatagcttaaatatattactagtaataaatttagtactgtgggtctctcattctcaaaatgagcatttactaatttctgaacactgtgctaggtcctgggaataccaaattgaataagacatagtctatttttctgaagggtttatagcagagtcccctgtgttaataatgaaggagtgtgtggtatgtgaatcatatatcaatagggttgttaaaaataatgaaaaaaggagaagaggaagaacatcttttttttttctgattgcacgggcagccttaaaattatttttgaagtgtacaattcagtgtttttttagcatattcacagggttgtattatcatcaccatatttttggcctcttgaaaagaaatcctgtgcctattagcatccaattaccgttcctttgtagctaagtctcccccattccagctttaaacaatcacccatctactttctgtctctataaatttgtctcttttggacatttcacataaatgaaataatataatagggttttttgtgcctaaataagcttctaaagaagaataaggtaaggaatcatcattcagcaaatatttattaagacttgctttattttatacagtgtactaggagctggagatgaaaatatgtgtagaacatgaatcatatacttcgggaatttgtggactagtgggaaagattgacatatcaataacaaatcgaattagtgatgtaatagaggcatttttacaggagtaaaatgaggtagcatggactctatctgggtctgaataatgtgaggagtaacctccttacacaaagaggcacaaggctaatgtcctctgatggaatgattcaccatgcaattctaagggtgacaagaatgaaagttagggccttgaagaaatattttgattaagagctgccaataaagtagagtaaagattagattgatgtgaagaagtgggagattaatgagtaaatggtcactggcttgttgagaagattaaatgagatgtacatgtaatgtacctaacacaacgtcttgtacaaagtagccattcagtagagactagcttgtattatctccctttgaggtaaagaaaactgttagaaatagtatttctactactgatagtatttcttctacttatgcctccctttgaggtgaagaatactgttagaaaacatgacataggagaaatacccctgagagacagttcttattagtgactactgtgcagaaaagatggaggttggtgtaattaaggagaaggaaagccatgaagccaaagtattatgaaaaagcatcaatatgaattttcatgttgacaaagtggtataaaagataattataaagatggtcacttataaatacggtagttctgtgtgacacaatttacagaagttggtatatcgtgtggaagaaaacagcataagatcctgaaggtttgaactgtgggcacattggctccatgctcaggaaatggcaatggggttgggaagtgattccactttatgtccctttcagacacataaaaattacttgtgtgagtatcttatgccagacactattcactgtgtagtgagcatggtgggtatgaaatgacaactttattgtctttcctgtcaaagaacttgtaggctggttgggggaaagagaccatttcaatatgaagtgctgagctagaggtacccttagggcactacagaagcctagctgatggcttttagcctggctagacagttcaggatctctaaaagcaggtgccttgaaggctgagtcaaatacaaaaatgtattttggacagaggaaattgtatgaacagaaacacagaacatgaaactacttggttggtgcagggtatcatcagcatagaaccagacagaaccagagtgtaaataagccagaaggccatgtcatggaggccttgtataccagtctcaggaatttggttgtggagagctttcatcaggggaatgatgtaatcagcttggaaatgtagatatatcactgactgtgatagtgaggagcagaattaaggtggacgtgattagaagctttgtgaatagcagaaagaacatagattttgaaagctggcagacgtaggttactgaagaaagttacttaaccttgctatgtctttagttttatcctctgcaatatggggataatactgcctattttgtagagtcttgtggattcttctggcatatataatagaaaataaaacagctattattattattgttgatggtactatttgctatatctgactacaaggagaaagactaataggaaaccatttcaggaatccagatatggtcatgatggacaggaagagacaagagttacatagaggaattctgggaagataagaaatgtcatttttatgtactgtttgcatccatcagacaaggcatcaggaaaaatgatccttcaggaaagagtgattttttttcttcaagaaattagaagaggggagaaattggtttaagattaaggactccatgcataagagaaactgggagggaagacaggtagaaatgctatggggttaggaaggaagaatgcagaggtggattacttagaattgagacatctgatcaagacagagggatcacagcttttgctaacaaagtactagtggaggatgccactaggtgaggtttaataaataattgttgacaataagttccatttaaaaaataaacaatttatgcttcttctttgcctaagtgtcaaataaaacattcagatttttatttcaaagtatccctgagtccctgttcccttttttgtcctgctgacttttggaactgatttaggcttccttagtcatctcataatagaaaaaatcagccaggtatttcctacatttcttgtattttaaaaaaatgtaatggatgtaatgaattttaagcaaatgtaatgaatacaataagtaacttagtatatgctgttttcttctctatgctgaatgtttcatacatgttattttctatacaactacatggtcaattccttgaaaatatcaactccaaaatctttattttggtatactccacgtagcacattgagagagttttaaactcttgttggatgactgtttcaaaagtgttttgaagtaggcatgtcagttgcaaaaagtttgctcagcaaatgttgttctgtctcacagtctcagacattgagcagatgattacatgacagcacgtgattgctgggagtaacagacaaaagtaactgaaagtgctcggttatcttgacagtcaaaatcaaaagtgtcccctattttcagtgacctaagagtttctttttgtgtttttggtattgttgttaaataagtgttctcacctttgaaaaggtcaataagaattcaatacagtataatgtctgtgtgccaaatgaaggtgccccttatttttaagtgtggaggagttttgatcataagaacttgaaatacctacagaatccttgatggttaagcagctggtgccagcacaagaatccctcaatatgttctctatgaagccccgatcaccaaatgcaaacattcatgattcagtatattttcatcttgactgccaaagttgatctgtttcttaatatattacatctagacttggaactggagatgagaacagaatattatcttcctcatttttgtgtttttgttcaactctaatgtctgcaaagcacttgcgtatgtaatgatgctcagtgtcataggagcaggcaggtaagtgtaaatttgtctggataggagaaagcatgcacaacatatttcacatagttttctgatttcagtttgtttttgcaaattattcactcagtgagatagcttaaagacgttatcacagggaaaggcatggagatagttctgtgttgatagaaaacttgtaatgtacagccatgagtgagaagtcaggttcagattcttcaccttcagtcctcctctttcataaacagctccatgtcctattttacatatcctactttaaaacgagattatagaagaatgaatttctaggcaaagtgacacttattttaaaatactattacgtatccctgtgcccattaacttatcctaccatttttcttcccctgtgtccaaaccacctttagaatctcctaaatatttgtagctattgtaaacagcactggagactttgctagtttaaaaggagaaatcaacgcaattaagccctagttaatttacttatcccttatgagattataattgtattttgttattaaaagggggacagagtacactgttctcttgcctttttaatttccagactaccacttctcctgcacttgacaataccgcagtctaccacgtagtcccatggctgacaggaggagaattctaggcaggccagtgtttgagtagtgagtaattggactgtctttacccagcaactcactgttttgtaaatgtacctgagtttggagaagtaattggcttttataaggggtgcggggtggagggttggggtggggagagtgagaaggaggtcagagctttaggatatataattggtctccacaaagttgttgtgatacttttggaaccacgtaatggtcttcattaactaagtgtctgtcatgacagccattacatatgcattataataaaaatttatttacagtgtaagttgaagaaggtaaaatctggatgtagtttctaaactctgcttggcagttttcatatttaagccactagaagaaaaaaattgggagggaagctgagaagaatttactgaaagaaaaaaatacttgggagggaaattggcaagaagtatgaaaaagcttgggagggaagtaagcaaataaatgagttaatgactgttctggaaaataaactctatcatgcagatatcacatgactgattaaatttgaatttgacctcctgctttccaggtctggtaaaaactaacctgtaagaacttgaaacttagcctttgaatggtcaatccaccactgtaggagaatttatgaatgttcagttgagagaactgaaaataaagaagtaccataggaattaacatttgcattcagtagccaagatataatggacatctgaaacaggtatttgaggccaggcgtggtgtctcatgcctgtaataatagcactttgggaggccgaggtgggtggatcacaggaggccaggagttcaagaccagcctactaaaacacacacacacacacacacacacacacacacacacactagccaggcgtggtggtgcacgtttgtagtccaagctacttgggaggctgaggcatgagaatagcttgaacccagaaggcggaggttgctgtgagctgagattgcgccactgcactctagcctgggtgacagagtgagactctgtctcaaaaataaaataaaacatatatttgaaacacattgaattatgtcccttaaacaagaataaacatcactaaatgactgtaccttgaactacctgtaattttctcctgataggtaattaagcttcaaagtactgacacttatttactgtaatatgaagcaataacttaaaaaaaaaaaaaaactattgaaccagaaccaaacaggaatgccatagcattttgtaaactaaactgctatttcatttcatttgagccctggaacttgaaaataaatgctagctaacatctgtgaacagaacatacccatcagtactgtgctaagcacctttcatgaactggtcattaaatcctcactttccatttatttagtgacaacttcacccagagtttgcagtcaaagtgaaaatgtgctgaattccaaaagtgtgagctaggttttagaagttaatcacaattctggaacaaattactagcttaacaaatgagagttcttatgtctctaaaaccaaaatagccctaagtctgtccctcccagtaagatttgggccagtcaatggaacagtaatatacaaatataattacagctgtctaggagcaaactatcctatgaatagataataaaattaagacacttaagccatgttttcatattaaaacacaaagtaaaaaatcattgttttccaaagataaaagccatactgtatcatgacatatatatgcccgatgtttcgaccctcttgaagaattgagattctcgactctacactcttagcgttttctatattgaacagatgtttaatttaaggaggtcaagagaaatcttacacttattttttaatggtaccttagacatagaaggaacctcagaaatctctggctgaatatttccatctgcagatgatcatgtcattaggcttctgactctatagccatagaaaaatattcatgaagacctttcaggaagggaatgttggtatttctaaaaattgagtacaagtattctctagacaaaacagctcttgaaatggcagattgtattcccattattatatttcagaatcaagacattaatacctactttttatttaccaggtttagttatccttgaattagattttataaattaaagaaatagatttcaataaatatttgttgagttcctagtatggaaacatcgtgtttggcaccagggatgttgcctgcaagtataacaggagttcgtatttgtaatgagtttatgatttacagatatttggggggcaaagatatcattcggtaaatacttatgagtgcaaactttgaactagggactgggccaaactctaggaacatatttgatgacagagacacaatccctgtcctcaaggagctttcattctagtagagaagatgaaaaccagtacagtttggtaagttagatgatattggttaatgtagggttcttatgtaagtctagagaagtagcatttaatctgttcttagaaggtcaggaaagatttccctggaggaagtgacatttaagctgagagaggatggataaacaggagtcatctgagtgaacaacagggagaacattccagaaagagaacaaaatgtacgaggcctgatgccaagagagaacattcattgcattggggaactatagtcacttctgtgtggctgggatgtagaatgaaatgagcctggacccaagagagcactttgccctttggggaagctgtaggtattacagtaaggttggagtctggaaagaaaggggtatattgtgagatctgaattgggagaggacagttatatccagacctttatatgctccagtaagaagactgaactttacactgggggccatgggactcactgaatggcattaaatttgagagtggtcatatgaccagatttgcattttacaaagattgtcattgactgcaacatgaagtatggagtattggaggagcggtaaggctggtggcagggagataatttaggaggctttaggtgagggatgataatgacttgccaggtaggaaggagtaaatttcttctcagtggataattagaagattgaatggatggacttggtcactatttggtatagaaggggaaaaaagatgtcaaagatgatgccaatttttaaaaataatttaacatttatttttaaatattttttcagccttattaaggtataatggacaacaattgtaggtatatgtcatttacaacatgatgttttgatttatgtatacattgtgaaatgactgccatagtcaagctcattaacatatccatcactcacataattaacattttgtgtgtatgcagtgagaacatcaggctctactctcttagcaattttcaagtatagattacatttgttaccaactatagtggccacactatacaatagagctccaggacttattcatcctgcctaactaaaactttgtactctttgaccaacatcttcccattcgtctctcctccccatgccaagtttccatcttggtcagttgggtggatagtagtactatctgccgaggcaggttggtagggtgaaaacaatgtgttcccttttggaaatgctgaggtgaccagggaacttccaagggaatctgtctggatctagagcttagaagagatgtttgggctggaaacagacatcaggtattcttcagtatatgggttgtaaatgaagtcacaggagtgggtgatatcaccaatggtgagtgtagtataagaagactggactgaggacagatttccaaggaatttcaatacttaagaggtacgcagagaaaagaggggctgtgaaggacaccaaggaggagactaagagccaggagggaaaactttcaagagagtattgcattatggaagggaagaagagagaacattttaaatgatacgcaatgctcaataatggtatccgctttggagaggccaagtaagattcctaagtacccattggatcaaggtccttaatcttacaaaaacttatgcaaatcaataataaagagatgataacccgataatcaaaaatagacaaggcatataagaagaaaatgaattaaaaatattcaaagcattcaacatatacaaatgcgctcaatctgatatataatgaaagaaaagtaaattaaaacaacaatgggcatgactaaataacagtatgagggagcctgaggagaaggagcatttgaaatttcagtacagaagagaaaaggggtgacttatagaaaaaggagacagaaaccatagaacatgtttggaggataagactcaaacaggtagtggggacccttttctagagtaggatgaaaacaggtaatgtgtgtggatgcaaatatgaggtaggatgtaatgggaagttgagcgaattcatatttagtcattcattcaaaaatacttaattgagttactgctgtgtggcaagcatcattctacaaacagagggcacagtgataagcaagccagtttgtactctcgtgtaacttacattctactttgagaagacagattataaataggttaaaaagtcaataatatgatgtttcagcatcaacaataaaaaattagggtgatatatagagtgccagggaaagtgctttcatggacctcttcattctctcctctcctggtgtcataagctactccttcatccatgctgccatttctcttggtttacggttccagtatagtactcatcacattattactatagagccatccaccttatgaaggtgaaggtgtccatctccttacttaaaaaaaaaaaaaacaaacaaaaaaacaaaaaacccgaaaaacaaaaaaagaggcagaaagacagaaggtcctccactaactttcacgtgccatgtaaccagcgaaatccaattattttacagcattctagctatagaagagtttgggaagcgtagtgcttagtgttctagcctttgtagcacaggaaagggcctggaaggaaaggaattgtgtcttccgcagttgcttttctttatggggaagtgctatagcccaaacaatattttaggaattttcatctattgtcaatatgcaaactggaaggggataatgaaaatgttgtggttagaagtttatgaaatattgttattcacattttaaagtaaaaagagggaatgtttaagagacttgtttaagatcacatgtctcataattggtgggaccagcaatacaatccaaatctaactacttatctttttgctatgccctattagtgttcatattagaaaagaaattctatctcagacactaatgatttgttctttggacaccaatgactttaagttaaaacttcatactagttaatttaattatggtgtagcagtattattaaactatcaagactataaattttctatttgtaaaggagattatgataccaaagattagtgaactaatgatattgagaattctatgacataattttgaaaaatatttgcaggatatttatttttgtgtaaatgatgctttcaagctaccataatcctaagtaagtgtatatttgggaaaaccacctattctaacacacttgaaatttaaataagtcaggaaatttttttccagatcttctcccaaattatcttcatctttttcctctccccttgggaaagaatctcttcatgcctcataatatcaaatttaaactatggaagtccaggtggtggacagtcagcaaaggggaagatgagaagcttgtgttataaagccagctcttgtcagaataaggatctggtaggaacttcagaagtgatgggtaggtaagtatgaaggccaggtcctaagatctaaattacaaagcagaagacttacttaccagggagctggaaaacatgttaggaaatccagagcaggaacagatttcaagatagcacaataatatagcagtgaagtactgagaaaagagtttttttcacgggttggatttattctagcattttaggcagcatttgggcatttctaagtggtcagacttagaggagatagttaaggaattagcagctgctaaatgccaattcttagaccagttgaatcaaaatcatctaaaaagctttcagaaaccagactttttaagggccatttgagagactctcaaatctggaatccagaaatctatagctagatgagtttaaggtagagccagaataagaaaaataaaatagtttgtttgtttcaggtatcttttccaatattatttccgaacctaccccaaacaccttaaatcactgcattctatagccattcttttaaaaatgcttgagttattagttttcaaaaacaaatacaaatctgcacacatacagaaataaacattaaagagacataaagatattaaacagagttacatatacttacaacttcatacatatatattatatataaaactgaatattaagtgtttgatattagtgacaaaatctgtaacatccattatattagtgctttttgtactttttgttgggtgtagtaaaaattgcattcgaatttgagttttctgctatatatttggtcagttcctatcagtgaaggaaaaacctttttttattattttattgtttttttattttttgagacggagtcctgctctgttgtccaggctggagtgcagtggcatgatcttggctcactccaacctctgcctcccgggttcaagcgattctcctgcctcagcctcctgagtagctgggactacaggcacctgccaccaggtccagctaatttttgtatttttagtagaaatggggttttgccatgttggccaagttggtctggaactcctgacctcaggtgatctgcctggcttggcctcccaaagtgctggaattacaggtgtaagtcaccacgcctggcccctttttattttttaagctgattgaagattcttagttctcatgctttctagtggtgattaatctttagccaatatttctatatacagttattagtaatcatgtttgacttaggtcaacaaacaatctttcctaaaaaaacagaaccccaattttaatttctgaattatttagtatctattttctgctgtggaagttgaattatgttgatagatatcatacagggccatgtaacactctcagatacacgttcacatgtatagtagctgtatacaaaaatgttacttcattctctctctctttataatactcttggctctcttacgttctctcacacactctactcttcccttcctctgttctttctacttgttccctctgctcctaccacacttattccccccttgtccattttccttgtgcataaagcacaagtgcttagtaattatcaaatattaataacaatgacactaaccacccaatgatttagtgttaatgacatgctttattgaatggcattacctctaaagttcatgtttcctttacccaaccaagcttcttaccctcctcccttaccacaagcatctatattgtcaaggttgttataaagagtaataagccagccattaaaaaagggtttatggtattttcctatctacaaagtcacaggaagctcaaatgtactcagtaaatattgcaaaattacacaggaccattaaatgtaacactccaccctttctctctctctctctctctcttgctctctctctctctttctgtcaatatagcaacaccctatatcattgccctttgtatgtgcaaatcagagttaataagctttatattagcaattactccttaacaacttctggtttgtttggtccagttgaataatgtaagcacttaaaaaaatgaaattataaacatttatgtgaaaagtgcatatatcacattggatatgttgttatgcactccttaataataaagtaagttaatctttattgcacacttattataatattactttgaccctctctagtactctttatctaagtattctcaagtgctttacaatctcaaacagacccaatgtgttgtatacacagaatcctttgaagctgacatttgcctttctgaccagcttgttgtaaaggaaatcagccaaaaaacaagtatctagatgagtagctcaaacattagtacacatagtaatcacaggtcaaaatgcagatagattaccctgtccaaattctcctgagtaagagtaggtgaaacatttttaaataagctccccaggtgattctgaaattggtccaaggaccacatattaagaactaatgatccaaacaatttgactttttattgtagattaaaccatgctgagaaaattattaaaaattgaaatggcagtggaggatggtttgaaagaaaggtttttcagggccctttcaacaataaaattaattgaacacaatattaaaactctatatttgatttaagactaaggttttcattgtttttaaatctcagtaatttttatgtaacaggtcaattcatacccagcatcttaattccaatgaatgatttcccacaacaatttttgtggataactccaagggaactcgaaggaagttgtagtatgaacaaagagaagtagaatttgtccctgtgtgtaaggcttctctgataagcagcacaggctctcatactgctttttaaaaaaattatgatagcatcaagtggaattaattttttttagattatactttcatggaagggaagatctactgtgaaggctggaaaaccaacacccttaagataaatatattaccagatttgagcgctcttagtaatcagcaaagataaatgtttaacagtgcatacaaaatgaagtgttttatgttaaatcaaatagagaaagccaaacactaataatgtggttacaaatgaacaataaattaggtaatcagaacaggtacagacattaatagcaggatattggtattattaatgtattttgttttaaaataatgaacttaattacaattctcctcatcctaccccactattttattttattccagattcagcagcttcatattatgtctctgaaacacttattattaaagttatccaaatgtacacatttctctttatataaatgtttcagtccagaaaaggaggccaaatacattagctcagaacatcaaatcttctcagatgtgggaatcttttattttcacacttttaaaggtaatctgtatttctagcgtctattatagacagaaaactttcatatgacaacattcctattttcttaactgccttgataggggcgaagacaaattctaagtaggactttttaccccattcttcttaccatcattctttcacaaaacccccagctttagacaatcgctattatgaatttgacatgtactattccaatccattcccataaatttacacccatatatacatatagttatctatgaacaatatttagtagcttttttgtgtgtggctttaaaatttacataaattgtataatttgtgcacattcttctttaatttgccttcttggctacggttatctttttgagatctagctatgctgctggtatgtagaattctatttcattcttttttcattgttgttttgtacccataacgtgtcacattttatttataccttctgttcctgatggacatttagattcttccaggattttactcaatactgcaatgaaaatctttgaatttttctcttttgcacatattcaagagacttttctgacatatatatctataggtgaattgtgtagtcatatgatacatacacacattttaaatttcactagatactgccaatttgccctttgaaatagccatacaatttatagtaccaccagccacttatgaaagttcccatttcctcaaatctttgaaagttcttattataaacagacatattaattcttgccattctgatttgtaaatcagaatctctattgttctacctctagttctaatttggaattccccaattacttgtaagatgctatatattttcatgtttgttagtcattctgatttcatatcctttaccaattatctttttggtaagttattgtggtggccatgagatgtgccttacagaggccttgctagagggaatgtgattgaatgagagccccagatgctgtgtattaaaatcctgcactgagtttgtctcaagatttcttgcacgtgaatgaatgagtacagctgggatactaaagcagatgtgtatttgggagatatgagacttctttagtggctgatttttggctcataaatgactttgccaaaccttccttagactgctcagtgttctaacatcttccatccagccttctacccttctttcctttactaggggattgaatttacattgaggtctcatagccttctctgcctctctccttatttccttttatacaaatatttcccctaataaatccatgcacatttaataccattttgctatttgcaacctgcaggtcctggactaacacagttctatacattgcattaccattctctagagtgggatcttttgttgtagagagttttaaaatttttatgtagtcacttttatccatatttttctttatggtttatatttttgtgtcttctctttaacacatcttttctagcagaattcataaatatattattctatattgccaaaagtttgaaagttgcaatcattagaattaatttttgtatattgtgtaagttaagaatctaattttattgtttttcattggaaagccatttgtcccaagataattttttagtagtccctccttcccctattgtcattctgacatattttttctaggttccgatctatgcatgtgtttctttatggaagagttggccctttgtatctttgagtttcaaatccatggattcaatcaaccacagatagaaaatatttagaaaagcgtcagaattgaacatgtacatacattttgcttgtcattattccctaaacaatatagtataacaactatttatgtaggatttacattgtattaggtattgtaagtaatctagagatgatttaaagtatacaggaagatgtgcatatgttacatgcaaatactaccccatttatataagggtcttgagcattcatggattttggtatccacagagagtcctggaaccaattccccacagatgccaaggcacaactgtatttattctatcatctacttgtttaatctcacatcagtatctacttttgaaataacaataactttattatttaactttttttattacttaggattagagaatttcctctggtgaggcatcatagtgtctcaagctggccataaagacaagtgagggctaggatcggtaagactgggcagaggaagatacaacagatctcctatgcatgaagcaaaagtgcagctcagaagccagctctttcattaagttgtcctctataccctcactagattgtaagctcttgaaatgagaggctataccttaattgtctctgttatctaaaatacttccactcactgcttggaacatattgcctgcaataattaagcttgccctggctcccaaagcatagagcaaatcacactcctccccttgcctttgagaagctcacagtcttcgaaggtagagatatgtgaacagataagaaaatggatgacaggagaacagaaacgcatgactgtcagagaagtcattggagactttacagaggaaattaaatttttattgatcttgaaagagtttgccagatgaagtagaggacaggcattttagacaaagggaacaggaaatgtgaaaacacaaagtgatggaagtcatggtgagtttggagaactataaaacttcaatgtggctgaagggtaaggtggatatagaggagtgctgggaggtgaggctgaagaaataagctaggaaatgtctttttatgccattttttaaagtttggactttattctgaagttcacatggatccaatattttttgttttgtgttgttttaagcagaagcgtgacatgatcagcttgaatgatgaacaacttgaattgtttaaagtggatcacacagtctactgttttacagttattctttgaccaagatattctttattaactgaggaaaaaaagggctttcctgaattttgcagtcatgggatatatgataagcattcttgatttatcatcttcaatcctgttacataacataataaccattgttattacctttagcaatgctttcctcagtattatctaatggcctataaaatgtgactttcatttgcaaatacagtacatctaacaagaacttaccacagctgctatgcaaaataccaatacaattgacccttggacaatgtgggggttaggggtgctgattccccatgcagttgaacatgttacataacataatacataaccattgttattatgtaacaggattgaaaatgataaatctttggaaagtggggcaaatgaattcttatgaattccatatcttccacatgtgttttacttttttgataagaagtagtaacctagttcagaaagaaaataatcatccccttttacttatgcaggataccaagtctatcttagcaccataatagtgaatgataggaatcaagctctatgaatacattcacatgtacatatatatggctatataggacacatgcatgcacatatacatatatacacttgcatatatgtgtatatacatgtacatatatgcatgtatattcaattgtatatgtgtatatagccaagttattgtacagttgacctttgaacaacacgggtttgaactatgcaggtccacttacacgtattttttttttccgtttctgacacccctaaggcaacaaggccaactcctccccttgctcttcctcctcagctgactcaacatgaaaactatgaggacgaagacctttatgaagattcacctccacttaatgaatagtacatacatttctttttccccatggttttcttaataacattttcttttctctagcttgctttattgtaataatatagtatataatacatataacataccaagtatgtgttaattgactgcttatgttatcagtaaggcttctggtcaacagtagactattgctagttaagtttctggtagttacaagttatatgtgggtgttcgactgcatggggagtcagcaccccaaccctcatgttgtccaagggcgttgtccaagggtcagttgtaattggtattttggatagcagctgtggtaaattctggttagatgtactatatttataaatgaaactcacattttataggccattaaatattattgaggagagcatttctaagggtaaaatcttgtctaatgcttgaaacatcttcattttcctgtcagtttagatctttttgaagtaattctgaaaatctctcttttaagctaaatttaacacaaccaaatagccaaatatttaagttccactaatgaagatatctaaatttctgttaaaaatttaagatatatgttaaacccttctaatataactcttctctcagtcaaacttttttttttaacagttgctttgcttcttctttcaaagtcatacttcaacaaagttgctattgaatatgtctgactaaacatgttagctatatgataagatggctggataagagataaatatagaaaatgtagctttttttctacttgcaataaccctttaggaattaaaatggaaaactaataactatttgattcataatagtagcaaaccgtaaaatatttagacataaatctactaagaaatttataagacatatatggagaaaattcaattgaataaaccgttattgaagtatataaaataagatctggatgaatagaaagatcataatttttaataaaattttgcatcttaaaaagtgaaccctctccaaatatatgcacatttaataaaattataaatacatcccaatgaggttggttttgaaattttgttaattggaacttaaatttcacctaagaagaaaaaataaagaatagttaagagtgcatgctttgtagacaaattgccttagttagaatcctggctctatcatctattagctatgttatctttgggataacattcatcttttcttatagatatgcttaaaacagtgcctgacatatagtaagcacaaatatccattagctattcttcttattatttatgttattagtattgttaatatttgttattatatggaagactaaatgaccaaagagagtcaagaaatttatgaataagatttatgcgttgttagatattagagccattaaaaaaaaaaaaaccaaagtgccaaaaaacctagcacagtgttaatacaggaataaaaaaatggatcagaggaaccaaacagaaaagccagaaatggatcttaggaaacatgagaatatgatatatgatagatgctaaatgaattcagtataaaaatattaatgtaataaatcatgcttgctattcaagtaaaagaaaatgaggttagattcatgtctcataccaaatataaccataaattataccttgattaaattttttaattaaaaagcaataatatttgaaaagaaatataggatactcaatgtataacctgaaggttgggtagtacttttcaacaaatataggaatttttcacttgaaatactagaagaaaaaaagatagcaaacaaatacaggaattccaatttcaagcagatataatgatttcatgaaatgttaactgtgcacatgatagatggtctatggatagtgcaaaagaaaaagagaaaagaaaaaatgttttttaacatatgcagcaaaaaaggtttttaacatctattacatacaaataaaaatgaatgtataacacagacttcaataaaaataggcatttcacaggagaacaattcagatggccagtatttacaatttcataggtattaaggaaaatacaaattaaaatggcaaattagcaaaaattgaggtgtgattatattaatatctgttggtggtggtgattatggggaaaagggtactttcaaaacttgctaatataaatataattcttttggttgttttgtaaaggaacctgacaatatcttttaaaaataaagaaaacgcatacttttgacctagccatcccattcatgagggtatgtcttagaaaaataagatcacaaaatcatagagatttatgtgcaatgatattattggtaggtcatttttatgaggaggggtgtggatagtaaatgccagggtaaatcacatagcatctaataaacgtatttatgaactacaaaagcttacactttcagtctagtctagtccagactgcaaataaatgtgagcaagtgaattcaagcacagaagtgcttgaaggcaggtttcataaatctactttcttacagtatcctgatattgacttatcgagacagttactgtggggttgattattaaaatatttatgtatctaggtatttttcattcagtagtatgttattcaattagcaacaagtgtggggatttaaagatattcttgtttgtttttactgctgaaacatattctagtggaaatttcgaataaacgattagtcatcctaaaagcaagatacattttctcagaaaagacaaggtaaagaacttgtatatcctccctcaattcgtttataaggtaataagatgaataaaaatatcatagtacaatttagcattgtaaaataaaattaattggtcatctctagtgtggtcgtgcttggaaggtgaaagaagccaagatcttgtctgggaatatcatgtctaccttgacctcacccttaagaatcctagcctttagtttaaaatcacatggctacatacataccaacttcaacaatagtacatctggcaaggtcatgcaaacctgggacttgagcttctgattctaagtccagtgctttttgtgtacatcatctcttgtacataccttatgatgatatgctaataaaagctacgtgatcaggccttaaaaatctgctttttttttgtaatggtagaatggggcatattatcacatcaggtaaacactctattcaaggataaatggaaatgaatgtcatatatagatcattgataaatatctcattacaaaattatgagagttaccaatgtttgagtgtatattatgggccagccctttatattaaattacttcaaatttttacaactgttaaaggaagatattattatacccattttatagatggacaagttagggccagaaaagacttcctcaaagctgttagtccagtaatggagacagggctagaaaacaggtcattttgctctttgactaatgttactactcatgttttgtattttgtttaaagttttattttattttgctttatttattttttgagacaagatcttactctgtcacccaggctggagtgcaatggagtgatcacggttcattgcagccttgacctcctgggctcaagcgatcctcccacctctcaatctccagagtagctaggactactacaggtgtgtgccaccatacctggctaaattttgcattttttgtggggacagggtttcactatgttgcccaggctggtcttgaactcctgggctccagcgattcacctgccttgacctcccaaagtgccagtatcacaggcttgagccaccatgtccagccaagttttattttagaattaaaaaaaattccacttggattgttacattttatctcattgctttatatttatagaattactttataaatgccactttcttaattttcatagttagcactctttatgaaacataaactattatttgacccaggtttttgttagaggaattgagtcagagagctgttaagtaactgagatttcacaataagccagacagaccagggttcaaattctgggtctcacattatccaattcaatattccagctttgttacttattgagcaaccactacaagcacagtttacatgacatctgatagctctcaaaatgaattttacaaacataattcagatttcaactcagcagtgactcaggagaaaggacacttggatgcatttctttatggcatttttcccagggtacacgcaacctggaagatctcccaagtatgggggaaggtttcaccctgaggaatcccattccctctaatctgggacaagggggaggagagtactgtctcttatcagccatctccccagggaggcctgggccctcctggaatgcataccatggcttactgactcaaagtgttgaaaagaccaggcattgggacacacaacactactcttaaaataaaaaaagaatcagagtagcttgtggttataattgaaatggacagagtaacatggtaccaagaaactattagcaattccttccctaaatccctcattttcttaaagcattttctccttttcctcaacaagctttaagttggatttgaagaatgataagactaaaaggagggctgtttctggtctttggaggaatttgatattccattcgatctgagtgtgcaaagcctgagttcacatgaactcttctgatctctttctctaatattttttcaccttattcatatgggaaagaaggaggggaatactttagttccattctccctcctcctatttccttgacttgtttaaaatataaatgttatagacacctaagatagaaatttgactgaaacagcctcttaattattgtcttaaaaaattggtataatgaaattgcatttgtagtctttggacatttaaatccagaagggatattttctttttcttttttaaaaatttaattcaatagtttttgggctacaggtggtttttggttacatggataagtgctttagtggtgatttctgagattttgatatacccatcacctgagcagtgtgcactgtacccaatatgtagtcttttatcccccccccgctccacccttcctttatcgtccccaaagcacattatataattattatgcctttgcagcctcattggttagctcccacttgtaagtgagaacatgcgatatttggttttccattcctgagttacttcatttagaataaattgtctctagctccattcaagttgctgcaaaggccattatttcattccgttttttggctgaatagtattccatagtgtatatatgccacattttctttatccacttgttgattgataggcatttaggttggacccatattttcgcaattatgaattgtactgctgtaaacatgagtgtgctttttttttttccatataatgacttcttttcctttgggtagatacccagcagtgggactgctggatcgaatggtagttctccttttagttctttaaggaatctccatactgttttccacagtggttgtactagtttacaaccccaccagcagtgtaaaactgttccattttcagcacatccatgccaacatctattattttttgactttttaattgtggctattcttgcaggagtaagatggtatctcattgtggttttaatttgcatttccctgataatcagtgatgttgagcattttttcctgtgtttgttatttgtttgtatatcttgagaattatctattctgtcctttgcccactttttgatggaattatttgtttttttttcttgctgatttgtttgagttccttgtagatcctggatactagtcctttatcggatgcatagtttatgaatattctttcccactctgtaggttgtctgtttaccatgctaattatttattttgctgtgcaaaagcttttcagtttaattatttcccatctatttatttttgtttctgttttatttgcttttgggatcttagtcatgaactttttacctaaaccaatgactataagagtttttccaatgttatcttctagaatgcttatgttttctggtcttagatttaagtctttgattcatcttgagttaatttttgtataaggtgagcattgaggatccagtttcattcttctacgtgtggcttgccagttttcccagcaccatttattagatagggtatcctgtccccactttatgtttttgtatgctttgtcaaagatcagttgactttaagtatttggctttatttctgggttctctattctgttccattgtctacttgcctatttgtgtaccagtaccaggctgttttagtaactatagccttgtagtataatttgaagtcgggtaatatgatgcctccagatttgttctttttgcttagtattcctttagctatgtgggctcttttttagttccctatgaattttaggatttttttctagttctgtgaagaattatgatgatattttgatgggaattgtattgaatttgtagattgcttttggcagtatggtcattttcatagtattgattctacccatccatgagcatgggatgtgtttccatttgtttgtgtcacctgtgatttctttgagcagcattttgtagttttccttgtagagatctttaacctccttggttaagtatattttcatgtattttagttttttttttttgtttgttttgttttgttttgttttgtttttgcagctgttgtaaaagggattgagttcttgatttgattctcagcttggttgttgtcagcagggacattttctaaagtatagactgtagttccttatcttctatctgtttcttactgtccccttcagtattcttgtccttttttcccgctattatctttttgaccttttaatatatagatatctacttctacttctgacaatttttgcttctccaattttctttctttttctcctctgcacacatttatttattttcttctatgtacttctttatttttaacttaatatttgattaacttcccttccctgtctcttttccttctttccataaatcttcattaattgcctgcactgagctaggattctatactctctaaatcaataatctattttctatagtcaactgtgttataatcgtactgtcaagataactacttatttttaatacttaaaaatattttgaaattttaaccaatttaattaatacaatgttgagttcaaatttgaaaaaaacaatggaaaactgtaataattctagcaacctcctgctttttaataatgtattagaaaatttgcctctttttcaaaagcctacagtgaatctattcatacaaggcaaaagcaaaccattctcttcattctctttttttctccaaaagatttaagtgttttttgtttgtttgttttgttttgttttttagatattgagtcttgctctgtcatccaggctgcagtgcagtggtgtgatcatagctcgctatagcctcgaattcctgggttcaagcaatcctcctccctcaccctcctgagtagctggggctacaggtgcatgctaccatgcccagctaatttaaaaggaaaaaaattgtgtagagatgggtcttgctatgttgcccaggctggtctcaaacttccaatctcaagcatttctcccacccagcatcctgaagtgctgagattataagtgagccactatgcccaaccagatttagtttttaaaaagagaatacgatttgaaaaaggaaaaatgtgaggcaggagagaagaaatacacacacgagctgttttgtaattgctgtaaaactgaaatcttcagcctcactaaaggagcacttgcatgaacacctctaaattaccttattaccttctaaattaggtgtgaagtctaacttctaaattatgagtgaaatccactgcaattcttgttatttggatggaatcctaggtatgtggtccagttcatgagttgaacaaaagcatgctcatttaggccaggtagaaagaaataaagacctatgttttacatgtctcataaccactgaaggtccttctcataagcagtgcttatgggtattaacgacctctctatattttacttctccagtgcctaagtagccgagtccactgagtcctgctacatctcctccaacatgtcagcatttttttcacaggccttttgttactctagatcagaaatgttgatagcaacagttccttgagggcagcagctagcatgatgccagccaacaggaaccaccaaatggttcttaatataaattactacttattaatctatttactttgtgcatttggagttttgcatgtaaagtcctatttatgtccatatggtagataaatggaacaaatgaataacagaagtaaccattttgatactttagatatagataatattggattatttctggattgtgaaagaagaaggaagaagcatatggaagagaagttttagtagaggggaggaaggaggaggtggaaacgaatgtacaaggatgggaggagaaaagggagagagacttttttttttttaaggcgagagtttactacctatctaactcttcgcattcttgaagtctcagaccaaatcccatcggtttgaaagcctctagggtattctatctattgtatacttctgttatgtacaaaattaatttgccaattaattgtgaactgttttataaactatcttaaaatggttagttaaatctttgggatagtatttagctttctccaggattatgacttaccttctaaattagacatacaatgcctaggagtcaaggactattttgcataaattccagtcttcttttacaatgcctagaatgattgttaccacagaaatattcattacctgggagaaaggatgacaggaggggcagaatgaatggagagaggtcgtgagaatgaggtgctgaggatggacgaggaagaaagctgttttagttgggaggataggtgacagaagcatggaaaggaattgccttggacccatggaagcccagtgaagatacttagatcctgcaggggtgtgaataatgttcttttagtttctcttcttaggaggtttgttcattttgggagatttcttttgaaaagagtgaacttaaattggagaaaagtacattttagtatgttgataacatttgaatttgtaaaatggacctatggatgatctacacatatttatatacccataaatatacacatattttaatttttggtattttataattattatttaatgatcattcatgacattttaaaaattacagaaaaatttacatctaaaatttcagcaatgttgtttttgaccaactaaataaattgcatttgaaataatggagatgcaatgttcaaaatttcaactgtggttaaagcaatagtgtgatatatgattacattagaaggaagatgtgcctttcaaattcagattgagcatactaaaagtgactctctaattttctatttttggtaataggacatctccaagtttgcagagaaagacaatatagttcttggagaaggtggaatcacactgagtggaggtcaacgagcaagaatttctttagcaaggtgaataactaattattggtctagcaagcatttgctgtaaatgtcattcatgtaaaaaaattacagacatttctctattgctttatattctgtttctggaattgaaaaaatcctggggttttatggctagtgggttaagaatcacatttaagaactataaataatggtatagtatccagatttggtagagattatggttactcagaatctgtgcccgtatcttggtgtcagtgtatttgtttgcctcatagtatagtttactacaaatggaaaactctaggattctgcataatactggacagagaagatgtaaatatctgttagttccatcatagaccctgccactccaatgtacacaccagctttaggcttcttggtatagataaacatacattttcaaaatttttcatcataattttcataacaaaataggaaggcaaatgatgtcacttggcttaaaatctataatatttaaaataaacaggacaaatgcattaacattgttgggggaggaggtcccttagtagaaacactcttggtccaagcattttaaagctgtcaaagagatgtaaatatagataatgtatgtcaaggagagagctttgtggttaaactgtaactttcagtttaaacaattattggtgactctgatgtcaaatgtttctcaagctttatctgaacaaaattcttctcactttgttgccaaagtcgttaacaagaaatcacattgactcattgatgttttggctcctttcccttactttctgttgctttccaaaagctgagacaggaaactaaccctaactgagcacctgcaattgcctggtagtattctagtcatgtgtgtacttttgtgtgtatgtaatccccttacagctctgcaaagtaagaattgttctccctgctttacagaagagatcataagataattgaggctgttagatgttaacttgccaaaagccatacaggaaaatggtagagtcacagtttgaaccaggtccttttgattctttacattaaaccatgctttgatcttggaaatacactgtaaggcaataaatcaatagatacggataattcacaggcttctaaataaatggaagttgattgtttttatctgtgagccaaagtaagacttattctaagaattccacaaatttagataagatagagtatatggcttctagacatccaacatagaactgagtttgtgttatcagtttaagatttggttttgctgtaaggtgcacacactttgaggaactaaaaataattgtctgttcttattctgatcagaatgtgtaatgtgttgtccagttttggatgatgaatttcttatttctaatctcataagaaacttgtcatagatgtgagggagagaattaagaacagagtgtggggaagaaactgtgtacattttgatgggatccattatgtagctcttgcatactgtcttcaaaaataagttacactataaaggttgttttagacttttaaagttttgccattggtttttaaaaaaatttttaaattggctttaaaaatttcttaattgtgtgctgaatacaattttctttattacagaagtaccaacaattacatgtataaacagagaatcctatgtacttgagatataagtaaggttactatcaatcacacctgaaaaatttaaatgttatgaagaaattatctcatttctattaatatgggaactgtgtcttcatctttattactgttctaaggtcaactcaatgtagattttacttgcttatggtttcatattttagctaaatagtaaaataatatggatatacattttgttgtgacttactcatactttccttatttggaacttttatgaatatgatatagagactgaaactacaaggaacaaaatgcaatatcaattatacagttgtggcagcactgctatcaatttgttgatagtggttaacacttagaaaaacattttaaaaataatttcacataagtaatgtaatttattagctgtctctgacattttacagtttggaatagtttattttctttttggtgtcctcaccaaaacccaacatcttcaagggcaggaactgtataatttttgccattgtattttgagcacatagcatggtacttgcctctaaatagatactattgttaaaatattttttaaggtaatattttaaagtgtatgctatggtacagttcagtttgtgacttttgctagtttatgccacttacagttagcaaaatcacttcagcagttcttggaatgttgtgaaaagtgataaaaatcttctgcaacttattcctttattcctcatttaaaataatctaccatagtaaaaacatgtataaaagtgctacttctgcaccacttttgagaatagtgttatttcagtgaatcgatgtggtgaccatattgtaatgcatgtagtgaactgtttaaggcaaatcatctacactagatgaccaggaaatagagaggaaatgtaatttaatttccattttctttttagagcagtatacaaagatgctgatttgtatttattagactctccttttggatacctagatgttttaacagaaaaagaaatatttgaaaggtatgttctttgaataccttacttataatgctcatgctaaaataaaagaaagacagactgtcccatcatagattgcattttacctcttgagaaatatgttcaccattgttggtatggcagaatgtagcatggtattaactcaaatctgatctgccctactgggccaggattcaagattacttccattaaaaccttttctcaccgcctcatgctaaaccagtttctctcattgctatactgttatagcaattgctatctatgtagtttttgcagtatcattgccttgtgatatatattactttaattattattatacttaacatttttatttactttttgtgttagtattttattctgtcttctccttagatagtaaccttcttaagaaaatatatatgctaagtgttttactggtttaatatgcttagactactcatctacctcaatacttccttggagatctcctcctcagtcacacagagctcaggacttatatttccttggaactcctgttagggtccaatgtacatgaaattccctagacagacagacagtcagttatatggcttgatttcaaagtttcaaaatgatttaatggactatcaagtagtttattaggagaacagttattatactcttctaaaaataaagactttaagcaataaagatgtatatgtatataaaatggctgggttattcctagaagtacctttcttagaatttagttaaatttaatatccaagatactatcttttcaaccctgagattgtgaaaagtaacttctatcaatataaactttactacatttgtattgtgttagtgtgttacagtataatctagaacaatgtgtctttctatatgatatatgacattttaatgcctaaaaaaactgatatgtcttagatgattctagtcaggatttacttctagaatagattaaaattctatttgaggagagtcaaattaattatcgaattctcagttgttattattgctgttttatttttagtgaaacagattagtcttaatgtaaacacttgagaaataaattgatggtcaacctaaaatgtaaaaaagaaattaatagaaaatttaaagagcaacaaagctctgacatttaaaagaaatgaagtacaaatctctagggaccttaaagatcatctaataatttcctcattttctagataaataaactgagagaccccgaggataaatgatttgctcaaagtcaaatatctacttaatataggaaatttaatttcattctcagtctgttaacatgcaacttttcaatatagcatgttatttcatgctatcagaattcacaaggtaccaatttaattactacagagtacttatagaatcatttaaaatataataaaattgtatgatagagattatatgcaataaaacattaacaaaatgctaaaatacgagacatattgcaataaagtatttataaaattgatatttatatgtttttatatcttaaagctgtgtctgtaaactgatggctaacaaaactaggattttggtcacttctaaaatggaacatttaaagaaagctgacaaaatattaattttgcatgaaggtagcagctatttttatgggacattttcagaactccaaaatctacagccagactttagctcaaaactcatgggatgtgattctttcgaccaatttagtgcagaaagaagaaattcaatcctaactgagaccttacaccgtttctcattagaaggagatgctcctgtctcctggacagaaacaaaaaaacaatcttttaaacagactggagagtttggggaaaaaaggaagaattctattctcaatccaatcaactctatacgaaaattttccattgtgcaaaagactcccttacaaatgaatggcatcgaagaggattctgatgagcctttagagagaaggctgtccttagtaccagattctgagcagggagaggcgatactgcctcgcatcagcgtgatcagcactggccccacgcttcaggcacgaaggaggcagtctgtcctgaacctgatgacacactcagttaaccaaggtcagaacattcaccgaaagacaacagcatccacacgaaaagtgtcactggcccctcaggcaaacttgactgaactggatatatattcaagaaggttatctcaagaaactggcttggaaataagtgaagaaattaacgaagaagacttaaaggtaggtatacatcgcttgggggtatttcaccccacagaatgcaattgagtagaatgcaatatgtagcatgtaacaaaatttactaaaatcataggattaggataaggtgtatcttaaaactcagaaagtatgaagttcattaattatacaagcaacgttaaaatgtaaaataacaaatgatttctttttgcaatggacatatctcttcccataaaatgggaaaggatttagtttttggtcctctactaagccagtgataactgtgactataagttagaaagcatttgctttattaccatcttgaaccctctgtgggaagaggtgcagtataaataactgtataaataaatagtagctttcattatttatagctcgcaaaataatctgtatggaagtagcatatataaggtatataaacatttagcctcttgataggactaactcacattctggtttgtatatcagtcttgcctgaatttagctagtgtgggcttttttttatcttgtgagtttgctttatacattgggtttctgaaaagatttcttttagagaatgtatataagcttaacatgtactagtgccaatcttcagacagaaattttgttctattaggttttaagaataaaagcattttatttttaaaacaggaaataatataaaaaggagagtttttgttgttttagtagaaaacttaatgccttggatgaaatgagccatgggcagggttgtaatgaattgatatgtttaatagtatagatcatttgtgaataatatgacctttgacaagacacaagccattaacatctgtaggcagaagtttccttctttgtaaaatgagggaataaaatagatccctaaagtgtgtaattttagtatttctaaactttatgaaggtttcctaaatgataattcatctatatagtgtttttttgtgtgtttgtttgtttgtttgtttgagatggagtctcgctctgtcacctaggctggagtgcaatggtgcaacctcggctcactgcaacctctgcctcctgggttcaagctaatctcctgcctcagcctcctgagtagctgagattacaggcatgcaccaccatgccgagctaatttttgtatttttagtagagaaggggtttcatcatgttgaccaggctggtcttgaactcctgaccttgtgatccacccacctcagcctcccaaagtgctggtattacaggcgtgtgccaccacgtccagcctgagccactgcgcccagcccatctatatagtttaatatcaatctaaatgaatttctcagtcctgagcctaaaaatttagttgtaaagaatgatatccttgactaataatagtttctattaatggattgcatctagtgctaggtggcatatatttagtccccacaactaccctggaaggtatttaaaatttttcacatttgcagataaggaaactaaagttcagagttcggcaacatgcttgaattcaagcagctcctaggatgttaatggtggaggttgggttcaaatccagatctgtctgactcaaaaaatgcatactcctaaccagtgcactatatcccaattccataggagcccttctttgtgattcatagcactttcccatgagttttgttgattttgtgagaaacaaaactctttttcctttggactgtctggaatctctctttttcaaatttttgaaatgtatttctatgccaaaagacaaagatttctagaggaatatgcctaggatgagaattatgtaatttaaatcacagctggaaagagagaaagtcctaagttactaagaaatgttcaaacacaaatgagctttcagtctattggaagacctttatagctagaagtatactgaactgtacttgtccatggacccctgaagaaacaggttaaatcaaagagagttctgggaaacttcatttagatggtatcattcatttgataaaaggtatgccactgttaagcctttaatggtaaaattgtccaataataatacagttatataatcagtgatacatttttagaattttgaaaaattacgatgtttctcatttttaataaagctgtgttgctccagtagacattattctggctatagaatgacatcatacatggcatttataatgatttatatttgttaaaatacacttagattcaagtaatactattcttttattttcatatattaaaaataaaaccacaatggtggcatgaaactgtactgtcttattgtaatagccataattcttttattcaggagtgcttttttgatgatatggagagcataccagcagtgactacatggaacacataccttcgatatattactgtccacaagagcttaatttttgtgctaatttggtgcttagtaatttttctggcagaggtaagaatgttctattgtaaagtattactggatttaaagttaaattaagatagtttggggatgtatacatatatatgcacacacataaatatgtatatatacacatgtatacatgtataagtatgcatatatacacacatatatcactatatgtatatatgtatatattacatatatttgtgattttacagtatataatggtatagattcatatagttcttagcttctgaaaaatcaacaagtagaaccactactgatattttattatttcatattacatataaaatatatttaaatacaaatataagaagagtttttaatagatttttaataataaaggttaagagattcgaaagctcaaagtagaaggcttttatttggattgaaattaaacaattagaatcactgttgatattttattatttcatattacatataaaatatatttaaatataaagataagagtttttaatagattttataataaatgttaagagattaaaaaactgaaaatagaaggcttttatttggattgaaattaaaggccaggcatggtggttcatgcctgtaatcccagaattttaggagactgagtggggaggattgcttgagcccaggggtcaagaccagcctgggcaacacagtgagacaccgtatctacaaaataattaaaaaattagctgggcatggtggtgtgtgcctgtatgctaccattaactaaggaggctgaggtgggagaatcgcttgagcctgggaggtcaaggctgccctgaactgtgattgtgccattgcattccagcctgggtgccagagagagaccctatctctaaataaataaataagtaaataaataaacagcaacaacaaaaacactcaaagcaaatctgtactaaattttgaattcattctgagaggtgacagcatgctggcagtcctggcagccctcgctcactctcagggcctccttgaccttgacgcccactctggctgtgcgtgaggagcccttcagccctcccctgcactgtgggagcccctttctgggctggccaaggccagagccggctccctcagcttgcggggaggtgtggagggagaggcgctgggggaactggggctgcgggtgccttgtgggccagcgcgagttctgggtgggtgtgggctgggcaggccccgcactcggagcagccggccggccccgcgagccccaggcagtgaggggcttagcacctgggccagcagctgctgtactcgatttctcactgggccttagctgcctccctgcggggcagggctcgggacctgcagcctgccatgcctgagcctccccccaacctgccgctgcagtgggctcctgcgtggcccaagcctcctgacgagcaccgccccctgctccacggcacccagtcccatagaccgcccaagggctgaggagtgtgggtgcagggcgcagggctggcaggcagctccacctgcagccccagtgcgggatccactgggtgaagccagctgggcttctgagtctggtggggacttggaggatctttatgtctagctaagggattgtaaatacaccaatcagcactctgtatctagctcaaggtttgtaaacacaccaatcagcaccctgtgtctagctcagggtttgtgaatgcaccaatcagcactctgtatctagttaatctggtggagacttggagaacctttatgtctagctaagggattgtaaatataccaatgtgcactctgtatctagctcaaggtttgtaaatacaccaatcagcactctctgtctagctcagggtttgtaaatacaccaatggacactttgtatctagctaatctagtgaggaggtggagaacttttgtgtctagctcagggattgtaaacgcaccaatcagcaccctgtcaaaacggaccaatcagctctctgtaaaaccaatctgctgtctgtaaaatggaccaatcagcaggatgtgggtggggccagataagagaataaaagcaggctgcctgagccagaagtggcaacctgctggggtctgtagaagctttgttcttttgttctttgcaataaattttgctactgctcactttttgggtccgcattgcgtttatgagctgtgacactcactgggaaggtctgcagcttcactcctgaagccagcgagatcacgaacccaccagaagaaagaaactcctaacacatccgaacatcagaaggaacaaactcaggacacgcggcctttaagaactataacactcactgcaagggtccttggcttcattctcgaagtcagtgagaccaagaacccaccaattccggacacaatttgactgcagaaaatggatgtccaaccctgtggtttccctgggccacattggaagaagaaaggagttgtcttgggccacacataaaatacacttactatagcagatgagctaaagaaaagaaaaaagtccatgcgtaatctttgtgatatgtgccaccaccaataagcaaaattgttctcttattcaaaaggttggacacagctgctctagatattttattattaaatatgcaggcaattactgtttaaatgaagatttcctcacagaatgagattaaaagtatatattagtggcttagcattcattttagacaaccattttagagattcaaatcacacacttgcttacagaaattttgttgtcttcaatgtccccattgtggtttctttaccaagcctctactgttcttcacatcaccaagttaaaaaaaaaaaaggggcgggggggcagaatgaaaattgcatggtaggccacaagttcagatcctcatcgacacaagaggtgcctgaagcagtggatgaggcttttctatggatcatgagcagccacataaatgcttaaaagggcctggcagggagcatcagtgggtgatgtggctgggaggctgaatggagagcatttgttcttcagttatctatagaaggcagctgtcactcagcaccagctaagggcttcccatgagggaactggggatcaggtttcccagatctttttatgtaacaggataagacagagatccagctttttttgggtaattatttcctattttaaaatacgggtagttgattaaataaaaacaaacgaatgaacaccatatgggcacaacaaaacacatctgtggcttggattcagcttgtgaatgattactgcagatatttattctagaggacacccctgggtatgtcctaatataaaacctaaatctaaactcaagtcccatgctaccttcagagaataaatgacccagaaaaagaaccacctctcctaaggaagtataaatttgtaaataactgagacccaaacttacaactatacatttttcttattgttgggctgttgctaacctcaattaagaaggcttgatgatatttgtaaagtgtcatcactccaccatggtccagtaacatctgatcactccaccatggtccagtaacatctgaatggtcaagaaatatctaaacgtatgtaccaaaaatttgtgtatactactgtaccaataaaccatttgtttccatttgatctctgagtgtggtaatacatgttatttgccctgctgttgtaaataaacaaaccaaatggaggcttgatgcaagatgcagtgtagcatagtgccaactctggactccgactactcagggtgtaaattctaactctgttctattaacaccatgaaactgagcaagttagttaaaactcgctgggcccattttctcatttatacaatggagattttaatagtacagctacataggccattttgtggtttaaaatacatcatgattatgaaacacttaatgtagggcttgctacataatgagcaaggtttgttgctgttatcattaatatccttaattctcattattataaaacttgagatagtatgaggtgaacaagttcataacagcaatataatgaaaattttaataattccttttatactttaacaaaaatacgagattgggtaatttattatttttacatgagtaataaatattgcattaaaatatatttaaaatttaccacattaatgtctgccagtcatgccaaatgaccaacatgaatgtgaataaaactcagtctgtgcccatttaatcttaaccaaccctttataattgttaatgatttgaacctctgccttgaaagatcacattacttgattgtcttcaacttatctgaatgtggtagtgatttctgtaaatttataggacctttgtctcatgcagctccatggagttgaacttatgcacctttaaaatggtatatacttaattaattaagtgttgatctgcttcacatgtgtataatattattagctcactaaaccaagaaaacagtggtcctttagggaaagaaactaaattacaacagagaatataaataccatataaatatctattatttattgaactgtcacaattattgcaaaaaattaccttttagtggacaaaacaattgatattgcccttttctggaaaagaaataatgtaatatatgatgaatagttttggccagtatcctctagaccttgccagttaactggctctcaaaattttgaataataaaaacttggtgatagtagaaaaatagtaattttttaaaagtatgtgcacaattatacaactaaacaattcattcaccagtgttcacaattctattgccttctttgaatcaaaatttacatagtttttcttttagactaagctcctttatgataccagtgtgcccatttctcattaccattgaaatgtctcatgagcatgtcacattctggtacaactgctaatccaggatgacagtttagttcttttaaatccaattgagagccttctactcatgaccagagaacctaaagaaaggttaagatacatttattccttggtgtaagtgatttgtctatttttagttttcctaagggtcatatttcaatttagatttttttttataggttaggtaaaataggcttcccttttgcaatatgaaatatgtagtcttttaaaaaatttcttcaaagctattaaactgaaaaaaaattaatttggtctattcagtttgttagcacttaccattttggaaagagagtgactctacttttgtatttggtaacattttccctactacagggcagtatcttttgtaagttcttagatattagcaccaaataaataggcaaaaaaaatctattatgttaattcttagaacccctgcttggcagtgcatcattgactagatggagaagaaatgaaaataatacattaggaagcagtttcctggttcttttgaaaacaactagagagtcttgttgttgactggaatatctgaagatcctgtttaatgctttcattctatgattgttaagaatatgtcatagaactgctgtatcctgtttctttatgtcttcccttctgtttgttgattagaaatccctgagtggctttacattattagtacagtagatatgtagtatattcccataataccactgctgctattgactaatagtaataattttagggcagctttatgacagttggtttatgttttagggtgtcatttgacttgtgaagcattgaaatctgggtattaagcacactgttttctatgtggtatggaatgattcttaaagccctgagaaaatggaaaataaaaatatttttcctttttaccataatcacctatgactgtcactctatcataaactgcataaactttataacctcaaaacattttggaaatgaaatgacagaacttgcttactcaattgcttctatatacaccaaatatttttttaaagtattatgttaagtccttgaaaatattttgttctactcaatagaagcagtttaggttggtagttctatgtggaaaccgtgaggaaataattttatattatgatgactagaccagtctttgaacatcactttggttattgttccattagtaaatattataattatttctgagatttactcaccttcaaagaatgttggcaatgccagcattattaacactcctctagttagaacaaagaggaaatgtaataacaaaacataataatagccaaataaagagtgacttagaatgtacacccttatctaggatcctgagtaattcgattattcttaggaaatacacttttgtgctagaacaaagacttttgaaatagctaatttctgggtttcttttcattttgaattaacttgaatttcaaggaaacaagggtagtttttacagatacagtgcatagaagctctgtgtacaatgaagaaaagtaggaaagtgagaaaaatgccattagatttttcatcgttatactatctgatatgtgaatttaactaaaacttatatacctcattatagtacttcctaatgtaatttcttaatttaagtgttccccataaggtttttttttatataaacttaagtactgttaaatatttaaggcaaattcaggtataaaataagacttgttgatatcttattccaagcatatttgtttctctcctatttatttttattctgtgttcatttccaaaattgttttactcacaactgtttgttttttctgtttcattctgtggtaaaggtatcatttggctaattgtataatttcagtgtcatttctaatattccaattgtgatagtatcaacacaagattaaatttctctacatggtttatgagaatggaatgccaaattgaaatagaacagagcacagatgatctaaatataaaaagaactacaaaaatcacagttgtttaaaaaggttttttgtttgtttatatatggtgcagaacatttgttccttagccaaatgtttccaccttgagaaagctatagagattctatgtagtcctagtaccaataatatgttttaacctgaatgtaccttatctttattcataaactgtgactttttacactgctgaaacttttttttttaagacaatctcactctgtcgtccagtctggagtgcagcagtggtgtgatcttggctcactgcaacctctaccttctgtgttcaagcaattctggtgcctcggccacctgagtagttgggatcacaggtgtacaccaccaggcctggctaatagtttttgatatttctagtagagatgagttttgccacattggccaggctggcctgaaactcctggcctcaagtgatctgcctgccttggcctcccaaagtgttggtattacaagtgtgagccactgtgcctggcctgaaactcataattcatttccattaatattaatctcaccttttccaataattaattgatttcacaagtattagtcccctataatcattgaatggctaataaaattatttatagcaaacagattaattatctgccagcagtctgagattagtttctttaaaaaatgtttattatttaaaacattcagctgtgatcttggctttcttgtgaggttcaatagtttctattgagtaaaggagagaaatggcagagaatttacttcagtgaaatttgaattccattaacttaatgtggtctcatcacaaataatagtacttagaacacctagtacagctgctggacccaggaacacaaagcaaaggaagatgaaattgtgtgtaccttgatattggtacacacatcaaatggtgtgatgtgaatttagatgtgggcatgggaggaataggtgaagatgttagaaaaaaaatcaactgtgtcttgttccattccaggtggctgcttctttggttgtgctgtggctccttggaaagtgagtattccatgtcctattgtgtagattgtgttttatttctgttgattaaatattgtaatccactatgtttgtatgtattgtaatccactttgtttcatttctcccaagcattatggtagtggaaagataaggttttttgtttaaatgatgaccattagttgggtgaggtgacacattcctgtagtcctagctcctccacaggctgacgcaggaggatcacttgagcccaggagttcagggctgtagtgttgtatcattgtgagtagccaccgcactccagcctggacaatatagtgagatcctatatctaaaataaaataaaataaaatgaataaattgtgagcatgtgcagctcctgcagtttctaaagaatatagttctgttcagtttctgtgaaacacaataaaaatatttgaaataacattacatatttagggttttcttcaaattttttaatttaataaagaacaactcaatctctatcaatagtgagaaaacatatctattttcttgcaataatagtatgattttgaggttaagggtgcatgctcttctaatgcaaaatattgtatttatttagactcaagtttagttccatttacatgtattggaaattcagtaagtaactttggctgccaaataacgatttcctatttgctttacagcactcctcttcaagacaaagggaatagtactcatagtagaaataacagctatgcagtgattatcaccagcaccagttcgtattatgtgttttacatttacgtgggagtagccgacactttgcttgctatgggattcttcagaggtctaccactggtgcatactctaatcacagtgtcgaaaattttacaccacaaaatgttacattctgttcttcaagcacctatgtcaaccctcaacacgttgaaagcaggtactttactaggtctaagaaatgaaactgctgatccaccatcaatagggcctgtggttttgttggttttctaatggcagtgctggcttttgcacagaggcatgtgccctttgttgaacctccatttgactggcatgcacatgtctcagatattataggttatcatatattgttgctcctaatatttctgtgttagataattagagtagcttggtttgtaagaatgtgatgttggtgggactgtagcagaacaagaaggcccttatgggtcagtcatacctctcttttcaaatatttggtctagctctcttctgggcatcttgttgccaatatatagtattgctcaaaagggcaggagatttgaagtgatcaaggaaaatatattttttctattgattaagtcttttgatggggtagaataatctaatttcatgtaactgctcaaagttatatggtagggggatcccaaatgtattttaaaactatttttatatcatcatatttgaagtaatagaaagtcagagtagcagaataaaggtactaaaaattttaaaaactaataaggtactttgaaagaaatcaattatgttgattcctcattaaacaaatttgcacttaaagactgaggttaataaggatttccccaagttttttcatagcaacctgtgagcactttctctgttgaggcatttatggtatgaaaagatgagtaaggcacagttcttgccctggagaaggtcacaggtgagaggaggagttgacacagaaacatttgatataaagcaaggaataaattccaagactaaaattttcagaaatctaaaaaactcaagataagaaaaacccattatattttctgggtaacaaaatttcagtgttattaacatgtaggaagatcttgatatttattctgaagcccatgtgtgttgctgaaatattgccgcatttgcatatactcatcaccatcctctgttttggagctaagaattttagactcaagatgtctaattaagttgatccattgattttattttttatggaaatctgagacccacagaaggcaggggatttgcccacatttctagaagagtcagacatgagcgatgaggcacagtggaaagaacatgagcattgcctgagctctgagttggcgctataagagcagtgatcatgggcaagtgactcttctgagccttggcctcctcacctgttaagtgaagaaaagaatatttcagaagatctttgtgagaatgaaacaaggcaatttacttgcctgctacatagccaatgggaaatcaatataagttccccgtggttcccttctgtggggttttgttcccacagagggtgcactggccattccacttcttcttttccaagctcctcattccctttaacgctgttcatagttggttccaaaccatttgaaatataataagcaccaggatggttttttctttccaccaaagcaaatttcattttctaaacactgtttataaatatcaatggctattttttcaatttttgattatcatgaaaatatacaaatatgtttaattaaatatgctaaagaatgtattaataaatatgtattaaataattcctacatataaggcctttttgcttggggtatgggtgatacaaaataaatgtggcatgaacccactgacctctagcaatttataacctagaaaaagagttatgatatgtttataagttcctgtgatataagacatgcatatagtcattataacagaggtgcaaacaagatgtatcaagtatgtccagaggaggaagagattaatcccagctggaggaaacactgatgctttcttgcagcaggggcatttgagttgagaaagggaggaaacatagattttgacaatgagagctgaggggaaaggggtttcaggtggagggaaccgcatgtggaaagcagggaggtaggaaagtgtagagtgtgtttaaagaatagaccagtttggctgaaacaggatatttgagcagaggaagcttgtactaggtaggtgggttgaggccaaattatgcaaggcattaaatattaaactaggaattttggactttatcctgcagtttatggggggtaaatgataagattcaatatcactttatttgtacagtattatgttacattttatctaattgtttgtttaattcctgtctagacaatgaattcctcaagggcaaggagcatggcttattcacctcagtaatttcagtgcctagcattgtgcctggtacaaagtggacacttgtatataaccttttttaattgaagcaacaagttgtcaaccttacaaatgtgaatccgtgattcagatgacaggttgaaatgtagattgtctgcgaagagggcagaaagagagtatgacaaaggaggacaagacagtggggcaggcagggagagagagcagccagggtttcggtagaggtatgtcaaaaaggtatggaagtcagaggagaaggagacccctatgttatagaatacaaatggaagggaaatgatgacaacagtaagttgtcattaaatgcaaggttgcaaaagtaagattgtaaagcaggatgagtacccacctattcctgacataatttatagtaaaagctatttcagagaaattggtcgttacttgaatcttacaagaatctgaaacttttaaaaaggtttaaaagtaaaagacaataacttgaacacataattatttagaatgtttggaaagaaacaaaaatttctaagtctatctgattctatttgctaattcttatttgggttctgaatgcgtctactgtgatccaaacttagtattgaatatattgatatatctttaaaaaattagtgttttttgaggaatttgtcatcttgtatattataggtgggattcttaatagattctccaaagatatagcaattttggatgaccttctgcctcttaccatatttgacttcatccaggtatgtaaaaataagtaccgttaagtatgtctgtattattaaaaaaacaataacaaaagcaaatgtgattttgttttcattttttatttgattgagggttgaagtcctgtctattgcattaattttgtaattatccaaagccttcaaaatagacataagtttagtaaattcaataataagtcagaactgcttacctggcccaaacctgaggcaatcccacatttagatgtaatagctgtctacttgggagtgatttgagaggcacaaaggaccatctttcccaaaatcactggccacaaagtgtgacattttggcattggcatcactatttgatggaagccaacctccccccaaaaggcctgtattagaatgaagatggattccctgggtgggttacacttgaaactagcctcacccatgaacactttggcacagattagctagcccattcccccacagtaaggaccataaggaagggacagaagcaaagataagttttagaacaaaagagaggggaaagaaaaaatctagggttttatgagggctgtccctgagtgatagatgtgaataggcctccagggcaggctggctcagaggctgactctttgggttggggtgactgattggtggtgaggatggagaagaaaaggggagtggaggaggtgaaagtgaccttgggacattaggtctccataagtgacaggatttaaggagtgttgtaagctgtggttgttggaccaggtttaagcacagcttcctgagcttcctgactggtttaggtcaagctccagagagcaaatgccacagtctcagtgatctccttggagaaacagttggaataggatgttgcccatgttgggatgagtcattgtccgctcttgctctttccctacccctgcaaaataataatactgtatttgattgaacatataaaacaaaagaaggattatcacataagtatgtatatataaccaacattggcaggtgcagaaaaaccagactgtcagtttgcctcatctgaaatgattgacacaaacaaatatatttactgtcccaagtgaactttggcattttggatatccttcagttgttctgtttaaagatataacttagaagcagctgatggaatatttaaatccatgcgttgaattcatgcattcaaagaaacatgtcctgagtcactaaatgctgacatttgtttttcatgttaagagtgtaaataactggtcccaaatataatattattacatcagataaaaactggaatgtgaacctcttaacttgattgtgaaagtatttgccaatggtgcctcttgataattatttgaggctcacttcagaactcctctggaagggttaatttttaaatagtcattttataaattaacatttttgacatatgtgatggctctcaaattttttcttttatgccagtttgaatcatttctgctcaatttttttttttaattgggatggagtctcactctgttgcccaggctggagtgcagtgatgcaatcttggctgactgcaacctccacctcctcggttcaagcgattctctcgcatcagcctccagagtagctgggattacaggcgcgcaccaccatgcctggataatttttgtattattactagagatggggtttcaccacgttggccaggctggtcttgaactcctgaactcctgacctcaagtgatccacctgcctcagcctcttaaagagctggaattataggtgtgagccactgcaccaggccctgttcaacttttaatgctaagattcatttgttgttgtttcacaagtgattaggcagaggtcttttatattaatttacccattttatttgtaagagagtctcatattaaggaagcataatatatgacaatccaaatacagtacaaatttggttaattttgattttgttaaataattaatcacaggggtccttcaaattgtgagctcctctggttatacttatgttttacctctggttatacttaatttcaaacaaatgaaatttcattctattcatgatatttcagaagcagatctgttgcacaaaataaagcatacctataaattttctttttttaaaaaaaagtctctgttcactctattttctattatttttctctttttaaaatttgaattttattgtggcaagtccacttaacatgagatttaccctcttaacagatttttatgtgtaaaatacaatattgttcaccatgggtaaatgttgcacagcagatctctggaacttattcattttgcactactgaaattttatacctgttgattagtatctccccatttccctctctcccctgtcctgttacccatggttctgttctttgcttctttgagtttgagtattttgatacctcatgtaatcttcattctattttctaactttgacaatgttctgacaaatttgctttccggattggagcactgtatagtgaaaattgaaaatcttggttattttctacagattcccactattttaccttgagcagacacttatcttgaagggtctcagatttgtcacttgtagaatggggaatataaacctgataatggtccctttcagttctaaagttatatcagttgaaaatacatgtgtcacttatggtaacgggtagagaactggctcactgaacagcatatggatattataaagtggttttttttaatcctttctgcagacagttactttatactttattcaaatggattattgtgaagtacatgttagcggactttgtaccttttaaaaatgtatgtatttggtgtaatgtagaaatatagaaatttattaagtatgatttatttcaatgttaagcatgagaaaatatgctccgaaaggttagatagcttgcctaaatgacaagcttgtatttcaagcagaactttctgaatcaaaagactccaagacgaatgcccagctttcaaaaactgtctaaccaaaataaatcctaagattcaccttcatactaaaattatttaaaaatagtttattttaaattaatattcacttaaaatgtatttatcatgcaatactttaaagtgtctgggaaatgaaaatatccaaagatcaaagaacaccatgttttcaaacttcaaaaatgttatcagtgacctaaacaatttttaaaattttcatagagcctatgaaaaatgtacttgcaaatggctactttctgactaggaatagaatggggagagtatttagtccaacaatgatagactggattaagaaaatgtggcacatatacaccatggaacactatgcagccataaaaaatgatgagttcatgtcctttgtagggacatggatgaaattggaaaacatcattctcagtaaactatcgcaagaacaaaaaaccaaacaccgcatattctcactcataggtgggaattgaacaatgagatcacatggacacaggaaggggaatatcacactctggggactgttgtggggtggggggaggggggagggatagcactgggagatatacctaatgctagatgacgagttagtgggtgcagtgcaccagcatggcacatgtatacatatgtaactaacctgcacaatgtgcacatgtaccctaaaacttaaagtataataaaaaaaataaaaaaaagtttgaggtgtttaaagtatgcaaaaaaaaaaaaagaaataaatcactgacacactttgtccactttgcaatgtgaaaatgtttactcaccaacatgttttctttgatcttacagttgttattaattgtgattggagctatagcagttgtcgcagttttacaaccctacatctttgttgcaacagtgccagtgatagtggcttttattatgttgagagcatatttcctccaaacctcacagcaactcaaacaactggaatctgaaggtatgacagtgaatgtgcgatactcatcttgtaaaaaagctataagagctatttgagattctttattgttaatctacttaaaaaaaattctgcttttaaacttttacatcatataacaataatttttttctacatgcatgtgtatataaaaggaaactatattacaaagtacacatggattttttttcttaattaatgaccatgtgacttcattttggttttaaaataggtatatagaatcttaccacagttggtgtacaggacattcatttataataaacttatatcagtcaaattaaacaaggatagtgctgctattactaaaggtttctctgggttcccaaatgatacttgaccaaatttgtccctttggcttgttgtcttcagacaccctttcttcatgtgttggagctgccatttcgtgtgcccccaaactctacttgagctgttagggaatcacattttgcagtgacagccttagtgtgggtgcattttcaggcaatactttttcagtatatttctgctttgtagattattagctaaatcaagtcacataaacttccttaatttagatacttgaaaaaattgtcttaaaagaaaatttttttagtaagaattaatttagaattagccagaaaactcccagtggtagccaagaaagaggaataaatattggtggtaattttttaagttcccatctctggtagccaagtaaaaaaagagggtaactcattaataaaataacaaatcatatctattcaaagaatggcaccagtgtgaaaaaaagctttttaaccaatgacatttgtgatatgattattctaatttagtctttttcaggtacaagatattatgaaattacattttgtgtttatgttatttgcaatgttttctatggaaatatttcacaggcaggagtccaattttcactcatcttgttacaagcttaaaaggactatggacacttcgtgccttcggacggcagccttactttgaaactctgttccacaaagctctgaatttacatactgccaactggttcttgtacctgtcaacactgcgctggttccaaatgagaatagaaatgatttttgtcatcttcttcattgctgttaccttcatttccattttaacaacaggtactatgaactcattaactttagctaagcatttaagtaaaaaattttcaatgaataaaatgctgcattctataggttatcaatttttgatatctttagagtttagtaattaacaaatttgttggtttattattgaacaagtgatttctttgaatttccattgttttattgttaaacaaataatttccttgaaatcggatatatatatatatatgtatatatatatatatatatatatatatatacatatatatatatagtattatccctgttttcacagttttaaaaaccgatgcacacagattgtcagatagcaattctgtgattgaaggggaaatatgtcacctcttcatactcatattggtgaagggtcctagcttcaaaattaatagattcctaaagaggggaaatgaaacatccgcatttacacacacacacacacacacacacacagagttcctcttgtcggtaagttttgttttttttaaatctctactagataaaatttgttatctaattgtgagttttacacaaagaaaaactgtcacagaaaagaaagacagtgtcacatttttcaaaagaaaaagaagaaaagaaagtgccatgtttttcaaatacaaatgttctggattgattttaggatctttagtgaaaaacaaagtatttcataataagtaaaataaaaatctatgtaggtaaatttgtttctctaatttaagaatttgaatttctgagtatttatgataagtgttgaaataacttcttatatgtgacagtgaatactggcagagcaaatgccaaatcaatgccaaatctgtaggatcatttgattgtaggaacagaattctactcaaaccgaaagcaggcatttgctggagttacagaaaggcctcatggaacaccgagaaggtggtgccattcgactcttaaagaagctgcaacaggcacaagagagtcagctgcagctcttcttcttgagtctatatctgtcctgggtccattcctttttgtggttgcttcattcctttctctctctgaagactggtttttctggtctaccagggctatgccacattgactttatgtagtgtctccattctggcctcctgaatttacaggagagttcctctgtacaaactcaaagtcctggagagaacagaaaacagcttccttttggctcaggggtccaactgcagtctactctgctgctatgaggatagtgggttcaccacctttgttgttctctcagctagggcagtgggaaatgactctatgaaaggaatatacatgggcaggcaaatgtactaatcctcatcagtactgtaattttaagcaactttaaaaaattcttttaagttatttgaaaataagatcaaagaaggctgaattacataaatgaagatttgttaacaattaattcaaaccaatataacacatgctataacatggttgagtgtgattgagtcttgatttattaggggcaataatcaaaacatttaacaatcattatagtacagaacttaccaatcaaatcagatgctcagccggagtggatgttggccacccagctattattatccctggctcaattggtcttcagctgtgttaacttgcaaacattaattaactatctaagcccctcattttcctcaagtgtaaatagacacaataatattacctattccataggtgtggggtgaatagtaaatgtaataatttgtccaaaacacttagtatagtgcctggtccatggtaaatactaaataaatgttatctgacttattattaaaattttatcttctcagcttaaccttcagaacagtaatatattggggtctagataaatcttgcctatatgaaaataatttaatactacatgcagatatatgctgtgtatattatgccttctgttagaggaattgcagaaacaaaaatttcaattaataataagatgaattatttctcccaattgtagaatcttttgacaattttatcatgcattacagatgtaagaactcttgattgggacttgatagtctaactttataataatttaagaacattcctcttagagaatttctatggccataatactgaacacatgaattttaattagctgtcctctttagccctaaaaaaaaaattactgtaatttaacacttaagtgttgttcttcccaggtacagtaatctttttttttttttttttttttttttgcatagagggtaatcttttctctttccaaatggcagaactgttagttttctgactgtccggtgaaattctaagtccacttacttcccaatagcatgcaattagcaaaggtcctccttgcaaaggcacagaacacacctaaacatcttgcagatgctgtttggacactcttcccctgcttttggtctctttgtaaagcagctcatctggatacaggatctcttttccccattgcccattctaatatatgttaccgttattacttatagaataatagtagaagagacaaatatggtacctacccattaccaacaacacctccaataccagtaacattttttaaaaagggcaacactttcctaatattcaatcgctctttgatttaaaatcctggttgaatacttactatatgcagagcattattctattagtagatgctgtgatgaactgagatttaaaaattgttaaaattagcataaaattgaaatgtaaatttaatgtgatatgtgccctaggagaagtgtgaataaagtcgttcacagaagagagaaataacatgaggttcatttacgtcttttgtgcatctataggagaaggagaaggaagagttggtattatcctgactttagccatgaatatcatgagtacattgcagtgggctgtaaactccagcatagatgtggatagcttggtaagtcttatcatctttttaacttttatgaaaaaaattcagacaagtaacaaagtatgagtaatagcatgaggaagaactatataccgtatattgagcttaagaaataaaacattacagataaattgagggtcactgtgtatctgtcattaaatccttatctcttctttccttctcatagatagccactatgaagatctaatactgcagtgagcattctttcacctgtttccttattcaggattttctaggagaaatacctaggggttgtattgctgggtcataggattcacccatgcttaactgagtggtgccaaattgtcctcaagtctgttgtactgatatatatccccatcaagagagtacaagaattctcatagctatgtatcttcaacaacacttggtgtctggtagatgtgaagtgattactaaaaatatagggaagctgcatacataattattggcttttgctgttctcttacattaatttcttattcatgttgattactcatttgtcacctagttttttcttccttaattaaattgtaggaatttatgaattatggattgatcatcagctctatacatttcaaacataatccctcagtcagtggcttggcttatagagtcttttgatgaaaagaagcttttaagtttaataaagttcaatttattgtcttttcctttatgttttgtgcttttggtatcttgattaagaactccttccttatattgggttctcaaatttagcagcataacattttcatactattatttaaatttttttcacattatttagtgatagcacctttcttattcctaaagtgtttatcattgccttctgtctttctgcttgataaatattgccacacatttgtatactttattagtgtgtacaaagaccacattttagttgtgttatttctcttgttttggttttctagaatgcagagccattaatattatagtaatgcttatgtgctaataccatatcaggggcacaaatcccattgcagcgggactgagaaattaaaggaaatgatgcacatttactcatttttgtttaaaaaatcaaatgcatatttttcaatcagactatatggttggtctggatagcttcatcattgaatttttaaagtatttttgtactactgtatttaaaattattcattcaccactgcttttgtagatggtttagaaacccaagttaggaatgactgtgcaacactattattatactctttttaaaattatactttttgcttaagtttctttccttgttctctgagacagtgttcatgttcccaaaccacacacatttattcagctataaaatttgtatgatcaactcctgtcagaacaaacatcattataaaaaatatctccaggaaaaagaaaacccttttaatgctctcttctggttcatgtgtcttcttattttctttaagcattttcataacccattgagctgtaatttaattggaacatgatttatactaaagttggtttctttacctttaacttttttttttagtttgatcagctctctttagcttctgtagttcggtctttaattccattccagtatgcttttggagttgggtctcataaatgtatagaaatgtttctgttgggaaacagcaggagaatattaaataaatattgtgcttacatctatttaattctttgcccaactttctacaactttgactttacatttaagctcctcatgcacttacatgtttctttacctaaaaatatcttttcaccatgggtgtgtacaattcctttgtccttgctgtattaattttcttggtttacatagtagcctctacacattgatgtcaaaacctctgtttggtgcatttctactctgcgtgttcaatctccatgaaagtttctgtaaggtattttcattcctctagtttttcacatgtgcatcctggctttgtgacctgtgctttgatatcgtgcctttcatcttgtggcattgaaggatctttgcaaggacctattgtgttataatacagtctatgaaaaatatcaatatttgcatttgatcacatttaaaaaaatcacattcttttgtttgaatatcaaagctaatatgtgagtgatttccctgccaaatagcacaagtagcctttcctgggtgtttatgggcatttatctggttaatgattcccatcatagtgctgtcacccatgccattgctaaacttatacagtaacttttttgttttcacctcagcatatgttgagagtaggaaatagataggactatgccctcaaattttacgtttatatgatgttaatcctaaaggtccttgtgacttctgaagtaaaaactcagtgttgtcattttacttactgaattgttagctgagtttagagttgagtttacaatggagtaaacaaggtgtttagtttgatgtatgcttttagtctttcagaaaaaaatgtttatacttggaaagaatagtttatttacccatctggcctagtttagacaaaaacacagagtcaaatgtcaacagaattctgaagttataaaaatgacagtgtggctttttttttttttaaccttccacctggtgcttatgcccaagtgcctagctttctttagctctcaactaataaaggtaatgtttagataacatttaacgttaagttgcattgtgtttatgatcacatatctcaaatattggtacacgaaactgtacaacaaccttttttattagattttcctacgaaattccttattatattccctaagatagctttttcccaccttcttcttccttctcccttctcaggtgctccaataattccaacccctgcagccagtgactttattatatctttttttaaaaatctaaaaaaaaaaattgatgcaaccaggaagaattttctcatttctctccaccagttgtaccagcctactgcacctctcctcatgcaccaccttctgcctgtgttcttgctcctatattcaggagcaagtaatatgcaatacctccctctttgtgggatctttctcattagcataaaaatactttcccttgatctccagctactaccccatttctttgacctacatatagcaaaatatttgagaaaggaccactttccatcttttcctcaatctacttccatttttttctcaatccactttcatttcattgttctcctcaacccattctttccacaacctacttcattttatttccatcagccccataactcaggatcaacatcttgccagagccaatttccttgtctcccttaacagctccagcagtatttatgccatggacaaattattcttcttgtgatactttctctcttgcttccatgacactactcccacttcattttctttctacctctctggctcttccttggtcccttttcctggccccttctctctttcagatctctaaacatcagctatatctcagccctgttctactgacactctctagctgttattttctaaacccatgtttcagaaaccatatcttgatgaatcttggaaggccgaggcaggcgaattacttgaggtcgggagtttgagaccagcctggccaacgtggtgaaaccccatctctcctaaaaatacaaaaattacctggccgtggtggcatgcacccagctacttgagaggctgaggcacaagaatcgcttgaacctgggaggtggaggtttcagtgagccgagatcctgccactgcactccagcctgagcaatagaggagactccgtctcacacacacacacacacacacacacacaaagaaaataaaccatctcttgatgaatcataaatttgtgtctctagtttagacctctatcctgctctctaaatgatgtatccaactatcatcttgacaccatcatatgttcataaaacataattatagaatatctttcagtaggcttgacattttaaggcatgagtttccgttcagtatctccttaaaatatacccagggtctcaggagactattcaaacaggacaaagcttctattctacttactaatgtgtctggccctatttggcaggttggataaaaagtcatctgaacattgtcactttatgaataatatagtttaatagtttgtgaatcacccctgcaatttaaaaaatagtaaaattatcagaatctaatttaataattcctattggaacaccccatgttaggggatttccagttatttcaattgatatctcaatgttttaaagattgtttatttctattactaattcactctttattttaacataaattgtggctatctatctctattcatttcaattatatttctcataccattctatagatggggtgaaaagaaaagtgttaattttttaaaactccatacctcaaatactatatgaatttatagttgttattgctaaagcaattatcttacatcttttcctccaaaacaaagttatgtgctggtttattttctttgtactcataagatgccttccatttttagtaacataagtcttgtctttctcctattcttagctacttaagcattatgtagcttaaataagcactaaagattcctatctgtatgaaaaaataaagattaaataaataagatctagaaagggtgacaaggtgatgcttcaaaatgaaccataccaagccatctagcgattgataaattactcacactcataatcacattgttggaaagaagccattgacaattcagtttgtttcacaactgtctatcacatagtgagcacaactaaaagactactttttgtcttttactgcttgttttgttgatcaagtgactgattgtacaatgaccaacaagaagtctgatgtgtagagaaaaggggaacctggcttttctgccttactcctgatgcctaattctgagcatgtgaatattattctgtttctttaattctccaagtgaagcagcagataaaccatccttgtttccattagctgtctaccctgttcaactgtgtgtttctaataacataagaataagaaagccaccagggtgagcagggaaggcaatgagtctgcaaggcttgtggatagatttctgttagtgaggctctagaaagttcttccaagattgatgcaatctgagaagagttttctgtcaatacaaactccctgggtttctcctttgtccttttactgcctgtgtttgttttgggttccagtaaagatcaagtgactgattgtaccatgaccaacaagaagcctgatgtgtggagaaaaggggaacctggcttttctgcattactcctaatgcctaattttcttgtactgaaagtagtttttgctgtaagaatctgaggggaggagtcatttcttcaatttttttttttggtctccttttaatggtttcttgatcatgtctatccttatttttctgttttcacaaatttttgtggtatattttcctctcatgacctctgtctcaagacttctttccatccatctcttctcatttcatcctgtagagtgtctgtggtaagagccctgcattctactctggccttgccatgtgtggccttgggcaagtcctagcctccttgagggtcttatttttctcatttgtaaaatgaaacagtttgatgagaagttttctaaggttccttcaagctttgacaatctctctcttctggatctttttcccatgaaaaatttcaactcttgattagcatgtaggcagggattattccacatccttataggaatcacatttctgctactgtccctgaatgctagagtccattgattaagttattcactgctgcaattgtcagagctgatcaaagaactctgaaccagtgtgttactagaactaacaaagaaaatgccattatgatgttctagagtcttgaattagtagaagaggtttaataagaaccctaagggattgctagaatgttaaaaacaaacaaacaaaaaaaaaggttgaaaagtttagaaaattcactggtctttgtgcccatcattttacttccagggtttagataatctcatttttgcaatgaaggaatggattagatcacaagttctcatcctagtagcacatgcagaatctttataaaaacacagagtagccaggtgcggtggctcatgcctgtaatcccagcactttgagagcctggggcaggtggatcacttgagaataggagttgaagaccaagctggtcaacatggcaaaaccctgtatctactaaaaattcaaaaattagccaggcatgatggcacatgcctcccagctactggggaggctgaggcaggagaatcgattgaacccgggagatggaggttgcagggagctgagatagctccactgcactccagcctggtgacagggtgagactccatcacaaacaaaacaaaacaaaagaaagcaaaaacacagattactcagggtccactaagaccagtgaagtcagttctcttggtagggggcagggtgactgagcatgatgtttgtaattttaaaagtgctccaggtgattctagcgtgtatcaagcaagacttgtgaaccactgaactacatgctaagactcattttagctctgattttctgtgagtcatagcagagggctcagcaaactttttctataaatgctaagatagtaaatattttcagctttgtgggctgtatcgtctttatgacaactcaactcagtctttgtagagaaaagcagctgtacataatatgtaaactaatgggagtagctagatgtgtcctgtgggccatagttttgctgactcctggtctatgtcatagaatttccttttgaattgatggaccaccagcaaatgatttttgtcctgtatcaatcaatgatacatacataaatctctacaagacatgtaaaggatgaggcttaatgacagagtactttggggaagacataatattgcaaaattaagatgcttagagaaaaatcatattaaaatagtgaaaactgtgagaaggtattttgatttgttgttttggattcctctttttgcaaattcttttgaaatattttcagtggaagctacatagatccaattgtattcaccaagctagattgtaattaagctccagagtaagtaatagatttgatgagtgatgtccaaccttttacatggaagagtaagtttgagtcttcctttgcccattgacacacttagtaccatgtttaccaaagttcttagttattgaaatgggcaccagcatattttgaaacgttggtgttaacttgggatatgccttttgtcatgttgcaaatagattttgtttctgttttgtgaagatcaccatctctgtcacttctgatagaaaaagtgacactgacttctcaagtgatttgacacaggttaaaatatgtaaaccatttctgtagagagcaagctgtaataatatactaaagggctaggtttatagtataatataaataactcatttatgctgttaataatttatagcaacatggcatttgactgactttttatgtgctctagtcatgtaagtaatagatgtggaaacatagaccagagtttcaagaacatgttttgggcagagtctgttttcttgctattatctcttaagtttatgttcatggcctaaagattatgctaatggatctgccttggtcttgggtgtcaggtctgtgttagcgagtattgaaaagcatagtttttgcctactgggaaggatttatgatttaaaagccctaaatctccccttttatgtacttcatacttagaaaatttttcctgtaaactgtgtgacttttttacattgtgccagttttctagatgactctcgtcatatttatttcttgcaatccttctataactatcagttatgaagtctctttatagtgttgccagccaggtctcaggtgtgtgaaatgtattttctattatggattttggggtatgatggcacatagtttgggtgttaatgcctaatcttgatgtactggcttctgaacaaccaaaaggatgaaaggaaatagaacaaatatttttgtgagggagaggagtctggcttcttgacttactctagaaaaagcctgtaagcctcctcttccctccttgtcacacaaagtgacaaagaaaatcaagaattgttttcttcttggcttaaatgcatcccttataaagtaaggctgagatcaggctgtgaagctatctttttgtcaagactgtcataattccaaaacactttgttcttctaatgcttaggttagtaactttaaacatttttataaagatagtgaggtccagttttaaggattgaccccttctcaaggggctcagaagaggttttggagaataataaaattaaataatgaaaccaataatttaaaccagatcatgatccttaagaaaaaatcccatcaaatttgggctaaactctaatatacagaggtctgcacaacttatgtcaagtattcttccccacaaatgaagaatggggttcattgtgtcattggttgggtctcattttggcttcatcttctatttctcaaagtctaagaaaagtgctcctacggaagtgggtgttggctatcatgagactttgctgctggcaggccagcttgctgctctagacagagatatccctcgatcctccttggacaactgttttctgtgcacaggaagcagcaggctggggttaaggagtttgccaatccagtcattctgataattgctgaatatgaatttctatccagcacaatctaggtagctacaatggcacagtagtttttatgtatcaggtgaaaatgtttaataggcactctaaatgagagaaaaggttaagtgaggttaaaagctcaatgaaaacaaatagatgagactaaaaatagttcaataggttgtaacttccatctcatccaaacagcaatgaatattttgaggctgaggcgctgaggggtaaaattgcagcctggactacttgctaatgtagacctacagcactgtcattcttactgcacagacactgctttctgcataggaggtagaataatgaattcatttattattaacaaagatttattaagtgactgcatggtgctaaccactagatggggagggatgttttgaactgtccattgtttgactataacaaggaacgctttgaacgaggttactatcataggcagaatttgtttaacatgaagcctatgagacataagccacaggtcctctcacgtgcaggaactcctttgaaggccctatacttaattttatatgcatagtttggatttggattcttttttttttaagagttccccaaattacttaagcttcaggctccacaaaacctggatctacccctggtagcagctatgaatctttgactatgaaattaagtgtacaagaaatatgactttactttttctgtgattgagtttattttctatttgagcacgcattccactgagtgaaagaaataatatcattgaattcagagattttgctgggttctaagtggagtttacagaatgccatgatattaggaattaaggagtgtgttgccctacatcatcttttgtccgtgctcactgtctctgaggcactgatgttcctatgtgacctagaggggcatggtccaggtagatggagtctgtccttgttctcactgtgagctctcgcttgctgacccttcttcagtttcttccatgcccctgaggggtaaaaagattcaaatctgaagctatatcaagccatctgtgcatagacattccaagcaaccatgttcactctactgctcccatgtcatgcaaggcacaggaagcttcactatggcatgagtatttcctgggctttgccttggaattgaggcacgggcctcctttgttctaaaattccccaaatctacttgaggatagaaccaggatttggttgcaaggcagaacttttcttagaggacctggtatctaaaccctcttgttacccccatttatggaccccatttatggggtgaggagagtgactgcttctaatccatcataatttttgtctatggctactgtttttgcatagacactatgttttgagtccttaggctttggcttttggcgcttaatggccaatattcacatggctcaaaattttcaaatgatccatatctgacttgagtttcaaaagtcagtttttgaaacttaaatgatcagaattgatttgttctgctctggttctgatgtggcctctccttccagaggtactggaggtagaatatccaaggtggaaagcccacgactacaaggaattggttagtaattcataatgttagctgtccacatctattcagtaatggcatttcagtggctgcacaactgaccatggtgaaagtgtctgcacaagccactttttcttcctgtcagaaaatgttctcacccactgaattgaatgactgtctgctcatatgctgtgaatgagtgcccagtcttaagattaaatcacacgttcttggctatgcatatttgggcatgctgtggggagttataataggctgtcttagagtcacattaagcagctagacagacaatgagttggaaagttacattttctaaatttgattggtacattccatttgtcacatttgacattagaagttctggattcaccctctatggtgagcttcactaatggagaatgtaatttgcaatgctcaaacacaagtcctaaacagaaaacattgtatgttacattccagtgctaccaaaatagtggttttgaaagtccttattttctaatactactatgtgtaattttgagtcatttagatagcaacagttaaatgttttatagattgtttggaagtattaaaatgtgaaggatttttgttatatagtgtctttcctatcttgcttaataaaatataagtttagaattgtgtatagaattaacatgcaaaaatatcaagtctcaactttatacagttaatctacatttgtgtatacccttcaattatttcaagagagggatactattcttatgcaggataaatacaataagatattttaaatgaattttaactacatctctggcagtttcatctcaatagtagttgtaattttatctcccagaccttattatagactagcagctctctatgaaaattagtgacagtgtgagtgtattttaattcaaagttaatcaagaatgactgagtcaagagttagctacccctgaaagtaactcataattcagaatttaaaatattacatgtggaacaatcatgactatatgccttttactttctctatcattatttaggttgtgggctttgggtccttttcacatccgttaacagtgggcttgacttcaaaggattattttcttgaatcttgaataattgctgaagacaatttgaagatattttcaagatgaaggaaactgaagcacagaatcactagagtgaaaaaagaacttcacaaacagtgcaggcttgatcaatggcatgggaaaacaggcaatacagttagaattgctaagatggaattttaacgttcaattaaggatctatctctaaactcctctgctttatccaccaatcattccatattaaagatgaagaattgttcccatttcaccttttgataaggaaaaatagaaataacagaagcaaatacacttttgcccacatttttttccaaaaagaataatttttgaagtctaaacgtttggtgtaaataagatgatgtgttaatattgtaaaggaaagctagttaagtttttgactgaataaagccagcatcaataattactagtaagactaaaaataagagcagtaaaattgtgtctaatcagctactaatatctgggaaggattgagccacaggatcaaagatggtatcttttaaaaatagaagttgagtgaattcggtcttcaaattctttctttttattcatttatatttatttactcattagtatattcattcctttattcatgtattgttcaaatatatattgggtacttattatatgccaagttgtttttaaaatcacattccaaattcccgtaagtcataattattcagagatgtatgttttttttaaaaaaaattgaacacctttaaaaattatcaagtccttttatttctgtatgcattaaagataaactttactaaatgttacatgaatagatttataaagcagataaatatttaatttcaaatataacccttatatgcaattatattttccttagcactaaaaatgaatatttaagtaatttatattaaaagtgtaattatttaactgcagatgtatgccaatgacttaaattgtttaaagattatagcaaagttgtttaaaattgtctaatcatgaagagttcacttaaccacctggttgacacataaaattatagttagttactaaggtagttcgagagaaagagaagaatcttcagtagtggttttgaggtgtggtacattttattataatataccggttatacagcattgtgcagtgctgctcatagtagaaataaattttctctttgatgtcatctattcccttgtgtggcttacataactgagaattaggtgatcacaaaaataaacaggcctatacagagcccatttatataagtcctggttatttctcttcagttaaacttttaattatatccaattatttcctgttagttcattgaaaagcccgacaaataaccaagtgacaaatagcaagtgttgcattttacaagttattttttaggaagcatcaaactaattgtgaaattgtctgccattcttaaaaacaaaaatgttgttatttttatttcagatgcgatctgtgagccgagtctttaagttcattgacatgccaacagaaggtaaacctaccaagtcaaccaaaccatacaagaatggccaactctcgaaagttatgattattgagaattcacacgtgaagaaagatgacatctggccctcagggggccaaatgactgtcaaagatctcacagcaaaatacacagaaggtggaaatgccatattagagaacatttccttctcaataagtcctggccagagggtgagatttgaacactgcttgctttgttagactgtgttcagtaagtgaatcccagtagcctgaagcaatgtgttagcagaatctatttgtaacattattattgtacagtagaatcaatattaaacacacatgttttattatatggagtcattatttttaatatgaaatttaatttgcagagtcctgaacctatataatgggtttattttaaatgtgattgtacttgcagaatatctaattaattgctaggttaataactaaagaagccattaaataaatcaaaattgtaacatgttttagatttcccatcttgaaaatgtcttccaaaaatatcttattgctgactccatctattgtcttaaattttatctaagttccattctgccaaacaagtgatactttttttctagcttttttcagtttgtttgttttgtttttctttgaagttttaattcagacatagattattttttcccagttatttactatatttattaagcatgagtaattgacattattttgaaatccttcttatggatcccagcactgggctgaacacatagaaggaacttaatatatactgatttctggaattgattcttggagacagggatggtcattatccatatacttcaggctccataaacatatttcttaattgccttcaaatccctattctggactgctctataaatctagacaagagtattatatattttgattgatattttttagataaaataaaagggagctgaaaactgaattgcaaactgaattttaaaactttatctctctgtggttaattgcaaacacagatacaaaaatatagagagagatacagttagtaaagatgttaggtcaccgttactaacactgacatagaaacagttttgctcatgagtttcagaatatatgagtttgattttgcccatggattttagaatatttgataaacatttaatgcattgtacaaattctgtgaaaacatatatataggatgtgcgaaaagtccctgtgtatcatgtgaaatggcttaaaacagaacaccataggtattcatatcagtgaataccataggtagctgaaagtgttttttcctggggtcgccaagatgaatgccaaaagtgatatcattattataaacaatagccagaataggttggtataaacctggtagaaagccttgataaattgactttctctcctcctgacatcctgccacccctttgctttgctgatgctcatttgtccactaaattaaactcaagcaagccctagtaaagtaatagaatttgtggagtcctcattagtataggaagtttccctgatgtgagattagtaattagagatgtagcaaaatgagaaagaagtaatatgcttagatatttcattttctctgaacctgtatatacaaaataggccatgcgtgttcagtaactattcactgcaaggcactctctaggtactttgggggaattggaaattactcacataaggctatggattgtgccatttgtcaaaagacaaaatgacaacaaatttagtttaaagacctcagtcagctttattttctattctagatttggacagtccttcatttcacaaattggagtaagtgttccaataagttgagcaaaggagcttggctttatagacccaaaaaaagggccaaaggaagcagaaacaaagaacaataagagaattggtcatttcaaagttacttttcttgaaaggtggggacaaggagacagaataatagaaaagtcactgattggttaacattggattaagaattaaaacagaggaaactttaagattgaagtttgaaactgacttgtttgggaaatcaggctgtcttctttcttgatttcttagaaggccggataacaactgagttttgctttggtgaacatgggtgactccatttttacttttagtctggtctgttgaggcctcgtgagagagcttaatctaaaacaatgacttcctataatttttgtttgacacatccaaagagggactctaatatttattgagagcttatcatatcttaagtactgtttaaacacttttatttgctattacatttgatcttattataactctaaaggcagaaatgattgcttttattttccacaatggaggaaactgaggttcaattaagtgagtaaggaagcagggatcttaaacccagataccattgctcctctttaaaggtggaagaacagaaaacatggggcaggggaagagagaaagtttctgtcccaggacatgataatctaaaagggaaaacgtaagatccactgaaacctgaggcagatttattgtggcaataacaaagcttaagtttcacagaccttcatttgcctgagccaactttgaaggccatgtatctaattttgtttttataattctataatctttattcttgaaaagagccctccctccaaatttacaagctttgggcccccaaaatccttgaaatgcccttgaataagagatatccaggtaaatgctatgggaattcagaggaggaagcagttagtatcagttggcggagagttaggctattaagagaaggttttatataggaagtggcatttagaatgaagctttgagaactgagctgtgtatttgaacaagtaaaggtggtgttgcagaattttgctccttagttctattaaaaacccgggttcttgtcacatgatccggaaaatttaggcacacagatacattgaagcatgagtagagcaggattttattgggcaaaaaggaaaaaaagaaaactcagcaaatcgagatggagtcttgctcacagattgaatcccaggccaccacaaaggaactgaagagatcgggcttctcccctgcataaggtgcaaattccccatggctccacccacttccccttagtgtgcatgtggggctccagtccacggtgggcatgcccagacaagccttgggcaggttccctcatctgtgcaaaagcatctgatgtaaacacttgaggggtggttcggagattctctgggacccttttattttcttatctgcctaggcatttggctgtctcagtgggtgggaaagggtgctccaggcaaagggcataacatgaggcaaagggcatgcacagaaaacagtgactggttcagtcaggttgggggatgccaaaggaagtaatgggagacaagattggagcaagatagataagagattgtggattttttttcttttttatctatataaatacagagacagggtctcactatgttgcccaggctggtctcaaactcctggcctcaagtgatcctcccacctcatcctcccaaagtgctaggattacaggcatgaggcactgtgcccaacctccaattttggattttgagagctaaagcaatatagtcgaaaactcagataatccaggtagattttgctattaggtgctatttggttcctggtacagagctaaaacccttggaatttcctaagtgataagagctacaggagcatcttttgttatatgtttccccccctagttcctgaaatagctctagagaaatacaggtgaataacatcctttgttattcatatcaagcccctatcaaccataccccagtttctatttatgaagtggcttttgggaagtccctaaagacaggagtggggaaaggctggttgtcagggggatgggttgaaactttcatcttccccccttgacctccagggagggatgagtggctgaaaattgtgtaaaatcaacaatggccagtgatttaatcaaccatgcctatgtaatgaagccacccgataagccttaactggaactttttggagagcctccaggctggtgaagacattgaggtgctcagaaggtggtattccagagagagcacagaatctctgttccccttcccacattcattttgctatgcatctctcccatctggctgttcttgagaggtatccgtttataataaactggtaacctagtaagtaaactgttaccctgagttctgtgagccattctagcaaattatcaaacctaaagagttcatggatacgtgcaatttacagatgcacagtcagaagcacagatgacaatctgggcttgccattggcatttgaagtgtgttgggaggcagtcttacaggaatgagcccttatcctgtggggtctatgctaataacagacagttgtcagcattgcttggtgtcgaaaacccacattgttggtgtcagaagtattgtcagtaggatagggaaaacagtttgttttctttttttagtggtctttggtcatctttaagagcagggcttctcaaagtgtggtccttgaaccagcatcacctgtaccacgtaagaacttatgagaaatgttcattcttgggccccaacaaagaattaaaaattctgagggtgtgaacggggtctgagtttcagcacaacttcccgaccatgctgatgcattcttgcccaagcatgaaagccctcccttgtttaagaaggccattagggccgggtgtggtggctcatgcttgtaatcgagcactttgagaggacatagtgggaggatcacttgagccctggagttctagacaagcctgggcaacatggcaaaatgctgtctccacaaaaatcacaaaaattaggtgggcgtgtgttgtgtgcctataggcccagctacttaggagactgaggcaggaggatcgcttgagcccaggagattaaggctgcagcgagctgtgatggcaccactacagcctggatgacagagtgagacactgtctcaaaaaaaaaaaagaaaaagaaaaagaaaaaagaaaggaaaatgaaaaagaacgccattaggtataaaggagcaatggtaaaagaccagttgcaaaaggttagggaatgggtggttactgaaataagaagctatgtagaacactagtgttggtggcaggaagtagaaagcaagagcactgctctgtgggggatggtcatagcaaatgcaatatggaggcatttgcctctgcactgaggagaaaactatcttttccaagataggaggaaaggagataagtggaattaaagagaacctttgagcacagagttgggaaactgaaggtatttgtgttgtgctccctcaatcttttaattcaactataagctaaacccatgaaacttgagtagtttcagttatctgacttttttcttctcttttgatacagtgttggctattctgggtcttttgcctctctttatgtacttaagaatcagtttgccaatgtatgcaaaataactggctgggattttgattgtgattggcttgaatctatagatggagttgggaaggactgacatcttgacaatgttgaagcttcctattcatcattatgaaatatttctccatttgtttgattctttgatttcttttatcagaatttagttttcctcatatagtcttttaaaatattttgttatattttgttcaagtattttgtttttgaggaatgccaatgtaaatggtattgtgattttaatttcaaattccaatttttcattgctgttatataggaaaatgattttttttgcatgttagccttatatctttcaactttgctataatcaattattgatagtttcaaggattttttggtcaattattttgaatcttctacatagattatcatcatctgaacttagttttatttcttccttcccaatctgtatacctttatctccttttcttatttcattagctaggacttccagtatgatgttgaaagtagtggtgagaggggatatcttggtcttgttcttgatcttagtgggaaaacttcaagtttcttatcattaagtatgattttagctggagggtttttgtagaagttttttttttttaagttgaagaagtctccttctatttttagtttgctgatttttaaaaagaatcaggaatgggtgttaaattttgtgaaatgcttttctgcaactattgatttgagcactttatttttcttctttggcttgttgatgtgaagtacattaattgatttttgaatgctgaatcaaccttttgtacctgagattaatcccgtttggttgtggtatataattatttgtatacatgttgagttcgatttgctaatactttttgagaatttttgcattggtgttcatgaaaaaatattggtgtgtagttttttgtgacatctttatctgcttatggttttaaggtaatgctggcctcatagcatgagttagggagtatttcctctacttttacatttgagaagagattgcagagaattagtaaaattcctactttaaatattttgtggaattcaccagtgaacccatctggacctggtgctttctgttttggaaggtcattaattattttaaaatagatataggcctattcagattacctattttttctcatgcgagttttagcagattgtctttcaaggaattggtctatttcatttaggttatcaaatatgtcaacgtagagttattcatagtattcttttattatccttttaatgtgcaagggatctgtagtgatgtccccttttttgttttattgatattagcaatttgtgtcacatcttttattttgctttgttagccaggctagagatatctctatttttgatgtttttgatgaaccaactttttgttttattgattttctctgttgatttcgtgatttcaatttcatgatttttaaattatgcttacatttgatttaatttgatcttcttttgctagttatccaaggtggaagcttatattgttaagatccttttgcattcttatgcattcaatgatgtaaatttccctctaagcactgctttttctgcatctcacaaatattcatgagttgtattttcatgttcatttagtttgaaatatttttaaatttctcttgatatttctcttttgacccatgtgttacttagaagtgtgttgtttaatcaccatttttaaaaattttctagctatctttctgttattgatttctagtttaattccattgtggtctgagagcatatattgtataattttaatttttataaaatttgttaaggtgtgatttatggcccagaatgtggtctatcttggtgaatgttccatgtaagctttggaagactgtgtattctgctatatttgaatgaggtagtctatagacatcaattatgtccagttgattgatggtgctgttgaattcaactatgtccttactgattttccacctgctagatctgtccattctttgcagagggacactgaagtctccaactctagtagtgaatattctatttcttgttacagttttatcaacttctgcttcatgtcttttgatgctttgttgctagaaacatacacatgaagaattggtatgtcttttggagcatgacccatttatcctcatataatgcccctcattatttcctcgccctgatgtctgttctctctgaaagaaatatagcctctccaggtctcttttggttggtgttaaaatgacttaactttctttatcccccttacttttagtttatatgtggttttaaatttaaagtgggtttcttgtagacagcaaatagttcagagttgtttttcgatccactttgacaatctttgtcttttaattggtatatttggactattgatattttaagtgattattgatatagttagataaacatctactatatttattactgttttctgtctgttacactacttgttctttgtttatatttttattgtctactctttttctttccattgtggttttaatcgagcattttatatgtttccattttcttttcttagcatagtaattcttctttaaaaaaacattttttagtggttgcccctagagtttgcaatatacatttacaactaatctaagtccattttcaaataatactaaataatttcatgtgtagtgcaagtaccttttaataataaaacactcccagttccaccttccagtctcttgtattatagctataatttagttcacttacatatatgggtatacctaagtatatacattatcatatttatgattgaatatattgatgaaattattttgaaaaaactgttatcgttaaatcaattaagagtaagaaaaatagttctaattttattataaaatgaaataccttcatttattcattctctaatacactttctttctttatgtagatccaagtttctgacctgtataattttccttttctctcttcagcttctttgaacatttcttaccagccagacctactgacaacaattttccccaatttttgtttgtctgatagagactttatttcttcttgacttttgaagaataattccacagggcacagaactctagattggtgatttcttcccctcaaacccttaaatatttcattccactgccttcttgcttgcattgtttctgagaagttagatataattcttatctttgcctttctataggtaagatgttttttcctctggcttctatcaagattttttctttatgaacatgatatgcctttctttttgaacatgatatgcctttctttttgaacatgatatgcctttgtgtcggattttttttggcattattctgcttggttttctctgagtttcttggatatgtggtatggtatctgacactaatttggaaaaattctcagtcattattgcttcaaatatttcttctgttcttttttttcctttattctccttctggtattcccattacatgtatgttacagtttttgtagtcatcccgctgttttggatattctgtttttttcagtttttttttccttcgcatttcagtgttggaagtttctattgacatattctcaacctcagagattctttcttcagctgtgttcagtctaccaatgagtccatcaaaggcattttacatttttattacagaatttttgacctatagaatttcttttgattccatctttgaatctccatttctcttctgcttttcatctgttcttgcatgttgcctactttttccatgaaaacctttagctttttttttttttctttttgaggtggagtctcactgttgcccaggctggagtgcagtggtgtgatcttggctcactgcaacctctgcctcctgggttcaagtgattctcctcctcagcctcccaagtagctgggattacaggtgcctgccaccatgcctgagtaatttttgtatttttagtagagatggggttttatcatgttggccaggcgggtcttgaactcctaacctcaagtgatctgcccaccttagcctcccaaattgctgggattataggtgtgagccaccatgccctgcctttagcatgttaatcatagttgttttaaattcctgatctgttaattccaacatccctgtcatatctgactgtggttctgatgcttgctctgtgttttcaaatggtgtttttttttttttgccttttagtaagccttgtaattttttattgaaaggtggacatgatgtgctgggtaaaaggaactgtagtaaataggcctttagtaatgtactggtaggtgtagcagagggtgagggaagtattctgtagtcctatgattaggttttagtcttttagtgagcctgtgcgcctgcagcttggaagcacttgtgaagtgttttttcaccccttttggtgggacatagtgactagtgtgagcgggagttgagtatttcccttcccctaggtcagttaggctctgaaaaaaccctgataggttaggcatggtaaaatagtctcttttgagggcaggcattgttataagaatagaatgctctggggccaggtgcggtggctcacgcctgtaatccccgcactttgggaggctaaggcaggtggatcacctgaggtcaggagttcgagaccagcctggccaacatggtgaaaccccgtctctactaaaaatacaaaaatcagccaggtgtggtggcacacacctataatcccagctactcaggaggctgaggcaggagaactgcttgaacccagtaagtggaggttacagtgacccaagattgtgccactgcagtctagtctgggtgacagagcaagactccgtctcaaaaaaaaaagaatgctctggcatatttgaaaatggttacttttccctttttttctctgatcttcactgtgagaacctggtaagcatcctataggcaaaattcataaaagtatagaagtcggccagtgacttggacccacttggaattttcttgctctcacatcatgcacactgaatctccagcaatttttcacttacagtttaggttttcctaccctactactggttctctcagaggtttctgcttattggtttctgttttgtaagttgtgattctctgtacctaactgcctgtctcccattttggggggcagtggtttgccctgtgacctcacttctctgacagatctaagaaaagttgtttatttttcagtgtgctctgctttttacttgttacgatgaagccaaccactttcagaatttctacaaaccagatcagaatctggaagtcctgtttttttattttttttatccctttgtttagcatgttacctatcttaacacattttaaataagtgaatgcatagcttatatctacttctaggttatatgcttccttagaataggaattgattcttaaaatgtcgttctgctcacgcctgtaattccagcactttgggaggccaaggcaggcggatcacttggggtcaggagttcaagaccagcctggtcaacatggtaaaaccctgtgcctgcaaaaaatacaaaaattagctgggcatggtggtggccatctgtaatcccagctactagggaagctaaggcatgagaatcacttgaacctgggaggtggaggttgcagtgagctgagatcgcgccactgcactccagcctgggtgacaagagcaaaactccatctcataaataaataaataaataaataaataaataataaaaataaaaaaataaaataaaacaaaaattttattctgagcagtctctgaagaatataaattctactgccttgcctttagaacttataacagcatctcgcaaactatcacaagatgctccaaacatacttcttatgtgctgaattaagaagtcaactcaaatttagtatactagtaatatttttggatatcccaaaacactgccagctcagctttaggctgcccttcttgggggggaaaaaagcagttgaaatttaggacttaagtgggcatctcgtttaatttttaatggatttctatgttgttggttatggtgaagaggtgaaaagaataaatattctgtgcagaaaaattattcagtcttcatgtgaaaacactttgtccatagcaattactttatgaaaaagatgtggtattactttctttgctcttaactgagacctttaatttaaagaacctatactttacaagtttttattttcaatgcatgaaaaatgtagcagctatttcacaacctttacttttaaaatccatttttctttttaatctcaaatagttttttcttaaaaccttttgactttttatctaaattgtaatagccagagcaccttcccacaactagaatatctcatcctttttgtcttttctttttcctctcaaaatgcctactgggaacttaatttggagtcagattcttcatgataaatctggacttaatcaaaattcctcatatggtatattgtatatatcacagtactggatagtcctctgattaaatagatatttgatagtactttaaggtctatacttttggatgaacttaactgctttctccatttgtagtctcttgaaaatacagaaatttcagaaataatttataagaatatcaaggattcaaatcatatcagcacaaacacctaaatacttgtttgctttgttaaacacatatcccattttctatcttgataaacattggtgtaaagtagttgaatcattcagtgggtataagcagcatattctcaatactatgtttcattaataattaatagagatatatgaacacataaaagattcaattataatcaccttgtggatctaaatttcagttgacttgtcatcttgatttctggagaccacaaggtaatgaaaaataattacaagagtcttccatctgttgcagtattaaaatggcgagtaagacaccctgaaaggaaatgttctattcatggtacaatgcaattacagctagcaccaaattcaacactgtttaactttcaacatattattttgatttatcttgatccaacattctcagggaggaggtgcattgaagttattagaaaacactgacttagatttagggtatgtcttaaaagcttatttgcgggaagtactctagccttattcaacagatcactgagaagcctggaaaaacaaatcccggaaactaattattatgtgccagttatataaacaagaagactttgttgggtacaaaccagtgattccttgcctttgaaaaatgtgtcagatatcatgcattaccagcagttcaatgatataaggaaaccagagtaatagctaaaacctttaaagctaaaccaaagatttacaaattgcctcttcatccagtctttcccaacctaaaaactgagttctctaaaaattttagtatttttttctgaagaaaagggaacatggacatttatctaatcctcattagaaatctgactaatgataacaaggatttagacctcaagcacttcttaccaaaattcttgatatgaccttatagcaaattactttcacctgttgaactttcctttcttttattcccctgtacctcacctgcactgggcatattcaagttgcttatacaacactttactattgtgttagaaaaatcatgacacatgatgaatgtgtttgtgcaacatgagctgattcataaatgaaaatgtgcattgaaattccacaatattttaaaattaggagtttatctagcaattgaacaaaattgattaaatccattatttgttagatcagctaaattacataagttcattcatctgctcataaatccatccattcttccatctggctatcccttagtcaattcaaataaatatttatggggcactttgggtaagccaggtgctaagaattcaatgcaaaacaagatagactcccctgtccttgttgaacttatatttttggtacaaacaaaagcaataatcaagaaaaaataaaaaaagtactgattgtgattaataatatgaagaaattcaacagagtattgtacttaacatttgattgatctgattttctcagttgtctgagaacaaacatttgtgaaaatctcattgtagagttcttacgatggatagggggtcaactgtgtcattattgcttatcagcttatcccaaagacctagtttattaccagattgcaaatagtgttcaataaattattcttattaagggttgttatgtactctaaaacatttattgtggtcccttcactggttctggtttacaaacttacttttctatgatgacatagtatagaaattgagagtgaatatttagaagttcatttttattatatatttttgaagtattgatatgtagtgaattagaaatttaaaaagaaaacaaaactgtccttcactacagattgaaaagcattatactaaaagaccatttgctcagttatagtatataaaggccaaatgacttaaaaacaaattatgtaaggagaaggaaacaaccatttattcagtgccactaactgtcagccagttttttcagtggtcagttaatgactgcagtagtgttctaccttgctcaaagcaccctcctcaagttctggcatctaagctgacatcagaacacagagttggggctctctgtgggtcacctctagcacttgatctcctcatgcagtgcatggtgctctcacgtctatgctatgttcttatggtctttaggtaacaagaataattttctttcttttccttactatacattttgctttctgaaattcccttctcgccaatccaggtgaatgtcagaatgtgatttgacaactgtccaaagtactcattcactgaggagtggtaaggccttcgcccaacctgccttctctgggaatatactgctgcctgaacatatcattgtttattgccaggcttgaacttcaccaaattaatttattagggtcaacatctaaatattagaactatttcagattaatttttaagtcgtatccactttgggtactagatcaaattgcaggtctctgcttctggcttgagcctatgtttagagatgatgtgcatgaagacactctttgcttttcctttatgcaaaatgggcattttcaatctttttgtcattagtaaaggtcagtgataaaggaagtctgcatcaggggtccaattccttatggccagtttctctattctgttccaaggttgtttgtctccatatatcaacattggtcaggattgaaagtgtgcaacaaggtttgaatgaataagtgaaaatcttccactggtgacaggataaaatattccaatggtttttattgaagtacaatactgaattatgtttatggcatggtacctatatgtcacagaagtgatcccatcacttttaccttataggtgggcctcttgggaagaactggatcagggaagagtactttgttatcagcttttttgagactactgaacactgaaggagaaatccagatcgatggtgtgtcttgggattcaataactttgcaacagtggaggaaagcctttggagtgataccacaggtgagcaaaaggacttagccagaaaaaaggcaactaaattatattttttactgctatttgatacttgtactcaagaaattcatattactctgcaaaatatatttgttatgcattgctgtcttttttctccagtgcagttttctcataggcagaaaagatgtctctaaaagtttggaattctcaaattctggttattgaaatgttcatagctttgatagtgtttttcagaagaccaaatttacagtgggagccttgggcttttgttttttaacagctcttttttgttcctgcttcagtggcctgacctccaagttagcaatcgccaggttgagaaatgctttgcgagacataacagatgctcctgaaataacaaacacttggaatcatgaggtagtggaattgaaaatagaaagtgtagtgattgttttttgttatttggatgggatgaacaatgtcagattagtctgtaactatttttttttaatgtcactctgatttggtcacaaaggatctctagtctcattgccttagtatcattctacgaattagaatgtgttactgtgtaagagcacttcttgtatatgagagaaatagcaacagttccagtttaaagtgatataaatggaaaccaagaaatgtctttactgggaccaaatctggacagcatttactgtatttttgctggtattttctctagtctttccgggtatattcacatttaatgatcacttttctccctttgtgctaatggacactgaatccattccactaccatagttcttgctaatactactctactttttacacaaaattaaaatgccaggagcacctccaggtagactgactataaatctagactgaaaaaaaagcttgtatttcttaacagattaccttgtggaacatttgctcctttcaactaatgaggcactaaatattgtaactgctcaactggtgcttttaatttatttgtctagactttgtcatgttgccagaagctttatcctggttggagttttgaaaacagtattgtttcttcagaaagaaaaaagggattgtcagatgatctaaaaataaagaaacactggaaatacaagtatcccaaggtgatagcattaggcaagataaaaatgttgaaaagcgaaaaagaactggttgatagagaagtgttgttattcagtagaacctaagtcttgtggtcccatttttaatgaaaaatggtgaattttttggtttttattgttcttgttcacacaaatctgcccattagaataagccaagccctaaaaattaatttcagtttcactgggaatcctttagtttatctactatgtagtagagaggttttgttttattgcatgtttgacgtaggaacgtatatatgcaagacatggaggaaaaccaagtgggccagagttttgaaaattctttatcttttctttctgccaaagtgagtctcccaagtttgtcttttttttttcatttccactcttctatggtttctagcattatataaaccaaacaaaaaaaatacgttcagagattccttcagaaatgctggatgatcttgatatcgatgcttttcatatatgtgtttatgatgctggtttctggggctggctctcagtatcacaaagatgtctgtaaacagaatatgctatttcttctttgtgacaaattttgaacattatgtgaatgtccaagaaagagcaaaagagggcaaacttctcatacatttttgatgtcgaaaccaagagacgcttttattttcctaacttttctttgaaagttcaaattaagtaattttatcctgtcctaaagtttaaaaagaaaaaaaaaaggaagaaggaattaaaaatccaaagaaaattatgtttgtttgcttttctgtttttttcttccttccaactccgagactttgcaagggcatagttctgaagatctctgacactgagacattagagatctctgtatcaatggatcatttgttttcagacatatgaaacaggaactttgaacaagaaatttcccctctttttctcatagtgatcctgagacatcagctgtggaatcacaacacgtcattagttttggcaggtccttgcaggtgttttgttttgttttattaatgttcttccctcctgtagctagacagcaatcttggagaatctgccagcttggaagactattgtgtaaatttcaaggtggagcctcctttaatttgttctgtgttacctgtgagctgtgaggtcatgaagaggagacaatgaggctaatcatgagagccccattggtttaggcaattagaacaacaagatctaaaatggtttattagccttgaattgtgttaagcacataattcataaaaaacagaaaaaatatttttaaatgtatgtctaaatcttcagttacaagtttgaaaggtgacaaactattctgaggaaatgattaggcctattcttgcaacgagtctttatgatctgaaaagaatctatgtccacacataactcccacctcaaagatggggcatcttttgctctgggagatatcaaatgcgaccaaaacaagtgtttgtagatttgaatgatgattcagcagtgtagcagttctcactcattttataataattaacaacttaataattaattattaaactcctacatgcttaacattataagtatgataacttctgtggttacataaaagatatacatagcacttgtccttgatctgtcacagtgaggtcccaatccaacctatgagcttcaaatgaaaagttcaaaattacactcattgtcataagtcagagatcaaaggaagaaaggatttaaccaaaatgataaattaaatataggtgattaaatatagtcatggttcaaggcatgggccagttagggagtgtgatgtgggtaattatgaaaggccagctcccaagccctgttgttgctactcccccacatcagtcatccttcctttttttctacttctactgcagtgccttcctcatcttttcccttgcatccctccattatatgagtcatacaaattagacttttcaaagcaacattaacattgtgtgaatttggggtttttgactaatcccaacattccacccccacattccagtcccacatgggatttggagccttgtttataaacctggcacttctaatatatcttatcttagagtaatccttgtatttgtttaatttccacttagcattgtaaatacttgcaggtatcctagttaagaaagcaaggtttaaacacaaaatcatcaccaattaaagcaggctagataaagaatgtaatagaaatgctagataaaacagattttttcttactaagttttctgtcccttatagagtgcataacacaataacttgcttgataagaattcaatgtacattgttttgtgctgaatcactaaatgcttgatttctgtaacaagagattgtggttccatcagtatctggattttagtctgtgtaatcttaggcaagttatttgatttctctgtgcctctgttttcttgtctgtaaaatgagtataatggtagtaactaattcattgtgtttttgtgaggattaaatgagttaataactagtactcctccctggcacatagtaagtacaatatgctgtgctgtggtggttgttattattttttatagttccttgagcaaaagaaataatgtccccatcttagtataatattggaggtatataccatagaagtgaacaaaagaatatagtttcacaaagaaagtgataattaaggcggttcataaagggtcataaagcttgtagattttagaaatgtgggggcatgaggatgtggagagggtattccaggatgccagacagggagattatggatgagtactaagatgagaactagaaaaagctgaggggcaaaaggtcagaggaggccacaagttagggagtattaggaaaaagaagttaatacttgacaagtgccaacatggcttcacgaggaatgggttgggcctttttgagtgaggaagaggctggtgaaagggtggtggaggacactgctgctgctgatggcatggggtgtaggtggcaggagaggcagggacatgagctaggaaactctccagctatgaagtgatgagtctggagtaatataaggacagtaggggtggagtgctgaacttaagggaggagagaaaaataattggtatggaagtaggtacaatgcaattttattatttctgagcctaaaaatgtgaaatttttgattatttggtcagaccagggaagtattttcttttatgctatctctgaaaatgtatacactaaaaagttgtagtataaaaaggttgtaaagcattaagtaattttagaggaaacaataatttggatattttacatgcaatcatttatatgcaaatatatgtaaatattacaaaattattctctatttgttacaaaccttaaatatttttgactgaggaatattttattcatctaattatagctactttgttctaactaatagatattcttgaaaacaaagcaacacttttttggagacagagtcttgcactgtcacctagacttgagtgtgttaccttgaactccagggctccagtgatcctcccacctcagtctcttgggtaggtggattacaggcccacactaccatgcccagctgtattagtccatcctttcattgctataaagaaataccggaaactgggtaatttataaagaaaataaatgtaactggctcacggttcttcaggctgtacgggaagcatagcagcatctgcttctgaggaggcctcaggaagttttcaatcatggtggaaggcaaataagaagcaggcatgttacacgacgaatcaggagcaagacaaagtgagggaggaggtgccacacactttgaaatgagcagatctcatgagaacagcgccaagaggatggtgctataccgttcatgagaaatccacccccatgatccagttacctcccaccaggccccgcctccaacactgggaattacaattcaacatgagatttgggcagagacacagatccaaaccataccaccagctaataccaaaaaaaaaaaaaaattttttttttaagacatggtcttactatgttctacaggctggtcttaaactcctggcctcaagtgatcctcccaccttggcctcccaaagcactgggaattcagacatgagtaacagtgcctggccaatacttatttttaaacattctctaccataaacttaggatcttgatttgttcacattgaacagatttttattatacagattgaatttataagaaaatgttgcagacattgtcaaaaagggacgtccaaaccactgtgatatttataagcatttgggccacattttgatagaactatacacggagtgtgtgtgtgtgtgtgtgtgtatatatatatacacacacacattatttatatatatgtatatatgtatatatatatatgtatttatatatatatgtgtatatgtatgtacacattatttacctacctactgtgtgagtgtgtgcatatatacacgcacacacacacacacaaatatatatatttcccttctgagacaaagccaaacagcactgtatgcttaaagaaaaacagtcacacttcccacttatgtaatttatattacatccagtcaccacaccagccaaactgctttattgttttttgtttgacatccaatgctaaagcataatgcctgttgcagtgaaatatacatgagcaaccctgagaactcaatatagcctcacgtgttgccactgagttgagttgaggagtcaagctgtagcaaaaaggtttgtcaccgggtgagtaatggtgctcttatttttctctgggtctcaagaagtgctctttatgacatatatggcattaaataaatatcagatatttgcacatcctaactttcctattggtgaagtttcttaaaagagagataaagggccattgtgtgattgatagtttcaggtatatttttgctgcacagtcagtccgagtgtaccacgtagggcaaaccacgtaacttctcagggccttgactgtttcatttgtaaaccagagaaaaggacttgggtgacctccaaagacctttcaaatttggagatgagtttgtggaaagttcaaacagtttagaaaacagaactaagacacccactggcacccctggaagcaagagagtgccaggtactatttgtaatacaggaatgaaatacctaattgtatgaaattgaattctaactgaaccagtttgttcagttaaattttttttttcaattagagtgcttacttcagtatctaacactagacagtaaactgtagacaaaagacctacagaatttctgaatggtatcaaattcaccacacttaaaactttgggatgtctaatttcaaccaacagctttctttcttcataatgttgaatatatgtgtatctattttagctaaatttaatatatatcaatatactttgatagatattttatataaactattagactatagtattatgagtaaaagacccaccatttcccaagcaattataaagaacgatcaaaattttaatgggttgttagtattatttctttaaagattgtgatactgataaatatttggccacattttaatagaattatacatgggatgtgtgtgtgtgtgtgtgtgtgtgtatatgtgtgtgtgtatatatatatggcagtagagatatatatatctacacacatctagatatatatatacatgtatatctatatatacacacatatatctgtgtgtatatatacatatgtatatatacctacatacatatgtacatatacatacatgcatatatctgtacatatatatatagtgtgtgtgtgtgtatatatatatatatatatatattttttttttcctgagccaaaacaaaatactaggttgtaatagctgttctttcagaaggaagaaaaacaacatgtgctgaactctgagtttgatgtttttgtattttacttcctattttcatatcagtccatttatttattcaggaagaatttattgagcatatattatgaacacagcttttgctaaggacagggtatgcagcagttatggcctagtaggagatatggatgttaaaaacaaaatgctcacaaatgcacatataatcttaatactcattgtaagctatgaaagcagagtgtgagtattatgagaccatatgttgggagattttatttggtattgaggatcaggaaagatacccctgaggaagtgatatttaatttgaaacctaaagaaagcagttggccatgggaagaaggtagggaatgagattcccaagcaataggaatccaatgtgtgaagaagctgagggagtgaaagaaagctagtgtggtggcaggaagaaagagaagagaatggagaagggcactaaatgagtcagagaagtaggaggggctaaaccatgtagggtcgtgtaggccatcttaaaggcctgagtgtagtggaaaacctttgaaggtttgttaaaaggtcaatgaaatgttctaatttctgttgtagtgaattgctttgattgctgaatgcgaatggatgggtagagatgcaagagtgaaagggaagaaatcaattaggaggctcttgccctgctccagataggactgataattaattttatttgggaagatcagggagaaagataagtcatgaatgactcccaagtttctggattgaagaaatgaaggtaccatacactgagatgggaaagcctaggggtagagtagctttgagaagaaaggtagcatttccccatttcataaaacatggaagaacaaagaggctggattcctgtttgtagacataccttccaggccagaactgcattactacaacatctttgcaagccacattgcctttcataactctgtgtcagtgttgatgccgtaacatctttggccttccccctaccatcctcccgcagtcctccatgataatgccattattccgtttcaaattgtgtgcttccattggatgtgtgagtctccttgaaagttataatgaggctgtagcccatatgaaatgcttcaactcaggtcctgcataggaagaggaagctaatctctccaggaactgagcctgtggctagagggatggataattgtttaaataaagaatatgctgctgagtactgatgggctctttatgtacccatttggctgctgctgcccaacctttaatctttcctgagctttaaataggaaggaaaaaatggtccacaaaggatttgagccattttgctgtggtgatgaggagcacgggtttagagacaaacactcctgtgtttgaattccagctcctactatctcctagctaagtgaccttggacaagtcacttaccttctccaacctgctgtttcttcatgtacgtaataggatttacctcatgaggttgacatgaagattgaaagaggtaacatatagaatgagcctgtcccaggacatggttcatgataagtctgccataaatgggagctatgtgtcccacccttttggaggagataactgttctgtagcaggtaatatattgtttgatacttggttaacccttacaattatcatttcctgttcttctcaataatgctagaaaccttttatttaaagaaccacaatataaaatgaaaaatatataaaaaaagcaaatggaaaaattctattggcaaggctttttaactttatatactaaataaatccaattgcttaaataatgaactgactcaagttctcagcactgcttcttgtttaattctctttagtttttcagaattctccaataatgacctttgtctactctcttcagtttattcagaaattacttttatttacatagaagtttggaagtggatacacaaacatatccctcacatatcttatgatcctatgagtcatatactcatctcttatattccctctgtaaagcaatgtaggtacctttcaggaaggtgatttttatgtaggttgagaaatatcagcatggaggtcctagctgacctctctagagagtttctgagacatttgacaacaactttttctttaagtcatcagttatgccccggggtatgaaatttctaacatgatcctcagtaaacttggctgccttgctgaggatactctccatctgcctgagagacacagacaccattaattgggaattgacttgacttgtgtggttccttgtggaccagatggccactaaatattctcatttcaaggcaattggtaaaaactacacttcaagaaatttcattcttaattccccttagtggatgttattaaccaaaggcaaaagaaaaaaagggtaaaaaaaatattctaaatgttaatatcaaaaatattattttcaattcaccccaggcacagagaactaagtattattattgctattgcaccggcattccccaatgagacagtgattttcttttaagacatttttaaataatataggcagaattaagtagacggtgatctggtaagtagatgtttcagggtaacagctgtgcaatgctccatgcagggaattagattgtcattttattccttaccaggaacatacattcagttaaacaattatttgacttctgctcttccactgatttctaagttgaggctctctcttgtgcctgtctgatcagataagtagagttgtgccttggtttatagatgagataaatgtgtatttgaataagcataagttaaagaaattttaaaatcccttaggaagctaggcttatcagagaaatccaaggaaatacattaacaaactaggaatttgttctaacaggttaattataactcataaacttattgggtttttttaccttttaattttatattacatttgcttataataaggaatattgctaggaataaaattttttaatattctacaattaacaattatctcaatttctttattctaaagacattgggattagaaaaatgttcacaagggactccaaatattgctgtagtatttgtttcttaaaagaatgatacaaagcagacatgataaaatattaaaatttgagagaacttgatggtaagtacatgggtgtttcttattttaaaataatttttctacttgaaatattttacaatacaataagggaaaaataaaaagttatttaagttattcatactttcttcttcttttcttttttgctatagaaagtatttattttttctggaacatttagaaaaaacttggatccctatgaacagtggagtgatcaagaaatatggaaagttgcagatgaggtaaggctgctaactgaaatgattttgaaaggggtaactcataccaacacaaatggctgatatagctgacatcattctacacactttgtgtgcatgtatgtgtgtgcacaactttaaaatggagtaccctaacatacctggagcaacaggtacttttgactggacctacccctaactgaaatgattttgaaagaggtaactcataccaacacaaatggttgatatggctaagatcattctacacactttgtgtgcatgtatttctgtgcacaacttcaaaatggagtaccctaaaatacctggcgcgacaagtacttttgactgagcctacttctctcctcactggtatggctccaaccatcaggccctatcttggtccatttaggctgctaaaataaaataccaaagactgagctgcttataagcaatctttggaggctgagaagtcaaagatcaaggtgccagcaggtttgctgtctcgtgagagcatacttcctggttcattgatggtgctttcttgctgtgtcctcacataatggaaagggcaagacctctctggtgtctcttttacaatggcactaatcccatcatgagggctttgttctcatgacctaatcacctcccacatgtcctacattctaatactatcaccttgggggttaggattttaacatatgaatttgaggaggtggcgggggggacacaaatatttagaccatagcatttcactcctgacctccaaagttcatgtcttcttcacatgcaaaatacattcattccatcccaatagcccccaaagtcttaacttgttccagcatcaacttacaaggctaaagtccaaggtttcatctaaatatcagctaaatcagcacaaacagctaaatcaggtagagtgggacttaaggtgtgattcctctttaggcagattgctctccaactatgaaattgtgaaatcaaacctattatgtactttcaaaataaaatggtgaaacaggcacaggctagacagtcccatttcaaaaaagagaaatagaaaagaaaaaaggagtgacaggtctctataagtctaaaactttaaggcttgagaataatttgctttgctttgcctccaggctcactggggtggtgtcttacctctggacacactggggtggaggctctatcctcatggatttgagtgtctcattctttgtggcaggtctgtgctccaatcccacacctatggctccctgagtgtgcaattgcatgcctggtggttctactggtctgggattgcataggtggcccagccttcatagctccactgggcattgccctaatgtgggctctatgtggtgacctcacccctgggcctctacctgggccctgtgactccctgggttcttgaaatctaggtggaggcagccatccccctacagttgtgctgagtgtagtgcatgagtgctggggtctgctagagctatacctagggtggtggagatgtatggcaatggagtatggggagctgatatggtttgggtgtgtccccacccaaatcttgtcttgaattataatttccataatctccatgtgttgagggagggacctggtgagaggtgactggatcatgggcatggttttcccatgctgttcatgtgatagtgagtgagttctcacgagatccaatggtttcataaggcagttttccctgctcttgcaccctctttcttgcctgtcaccatgtaagacataactctttcccttccgccatgattgtaagtttcctgaggccttcccagccatgtggaactgtgagtcaattaaacctcttttctttataaattacccagtctctttacagcaatgtgaaaatgtgctaatacaggagcaaagactgcagtgtgaggtggcaatgtgaagtctgcaatgtgaggtggcacggggcagttgtagcccctcctttgaaatctttcttccctaccccaggcctctgcactctgaactatgatgggaaaggcagcttggaagatctccaaatggctttggagtcattcttccattgtcttggactataaattctggcttctgtttaggtggctgactaatatccccactgtctgaatgcatagcacctagtttctgttgagatggctagtccatagtaatttacttatcaaatttggccacaccctttgtattctctcctgagcaggctttctcatctttcacaatatggataggctgagaattttccaaattttgaagttctgcttcccttttgatcaataattccattttaaagtcatttctcatcttgaattttactatgagcagtcaagagtaactaagctgctccttcaactttgcttggatatttcctcagtcaaacattcaatttcattgctttcaagttctgccttccacaaaacactaggacacaaacagctcagccaagttctttgacattttataagaaggatagcttttcctccattgtccaataacatgttcctcatttccatctgaaaacccatcagattggcctttaccgtccatatttctgggaacattctgctcatgaccacttaggtattcggtaagaagatagtagctttctctatagctctcctcctctctggagccctcaccagaatggcctttaattgtccattcacagcaatgtaggctttttctagcatgtacctgaaaactcttccagcctctactcattaccttgttccaaagctgcttccacattgagtatttgttacagcagtacccagatcccagtaccaatattctgtcttagtccattggggctactacacgatgtcttataaacaacagtaaaatttatttttcacagttgtggaggctgggaagttcaaaatctggtgccagcagattttgtgtctggtgaaggccttcttcctcacagatggctgtgttctcactgtgttgttacatggcagaagagtgggcaggctagctctctgggatgtcttttataagggcagtaatccaaatcatgggtttagggtagagccctcatgacctaaatcacctcccaaaggccccacctcctaataccagcatctttgaagttaggatttcaacatatgactttggcagggggacagaagctttcagtttatagcaaaccctataggtagcactactttgtcctttcctaatcaatttgcgtcaatgaaacatgaattagaagagacctaggcgactccactatactgggattattcccagtataaattatcatctctccacaccttctcatctactccctatctgagttctgaagctctccactacaagaaggaggctttggtttgacttgatatacttctctgggaaacaggtttagcataaaacagtgatgctcattctagaacacctgcaaatgacaatagttttctttcgaagtcgccaggaatcgtctgcctttgggtatgtggctgtgagcactgccgggcaaaatgccatatgacctagatgaggcatatgccatcctttgaagccattaggacattatataggaaatatattaactaaaatggaataaaattttctaaataacaccttatgtttatccaacaggtggttcattatacttgagagcattatacagaggaatttgatggggaggagagctggagaaattctcgaaattctgggtttctttaacagaatactctagctataaacttataattttaaaaaataagcattatattaaagaaaagggaacataaattattttgttttattaaacttaagtccaaaggtctggattgtggcagaataggatcaggggacctaaaatgttgagcctcaaaggtcttcttagagaacaactgtattccactattagcgcttttggtccttttagcccaatttctgtttatcccaaatgttcttcccttttctgccttccttcacagtggaccctgccaggagctttgaaatgcctgtgagtgttaaacacttacccattgagtgcccaaccttaacatgcccctaataaaatgtacttagattaaccgttttcattatcaaagtttccttattacccaacaaacacaggcgctttaaagaaaacattaactaaattgcaagtgacacattttaagatctttgatatgacttcagagaatgcactataggaacacaatgcaatgggagggaaacttgggagggaagacattagcctttataaaatctgcaagtattgccaaatcaaaataaaatttacaggaaagcaggatcataaatataatctaaaatcttagaacctgtggttatgattttaaatactaatacaatgcaaaatttttacctgtttaggtttttatttcatcagttcatatttaggtatatacttttactgttctccttttttataatttaccattcacaaagatgatgatgttagtctaactttaatgtcatgagtgctttgagtagtagtgctaagtttttgttgagtagtagtgtgcttttttgattagtagtgataggtttttgatgagtaagcctgctagcagcatacaaacaaacaagcaagtatcagcctagagaagcagaaaaggcatttgggtttcaaagtcacaaggcctaggctttagtctaatacagctgataatacaatttgtccaaacaggacatttttgggtgtgtcaaacactaaactggacaggacattatgacaaaagtgcaaagcaggactttccggggcaaaccaggatgtatgtcatctcactgagtcctctctttgtccttgccatgactagtatctctagaggtaaatgaacagagtaatgacaaatagccagacacctgaatcttatcccaacagcacctcctacataattccccattatcccaaatggaaattaaaaatatatacagtgataattccaggccaagaaatgctttatttctagcttggacttggcttccatgtccagtgtagaatcttatccttgctgatctggactgtatctcatgaagccatgacttgtacctagttactagctggaaggcttagaacaaaagctggtccagagagcctcctttttccttatttcctgggtccacacctttaccatggcagtctgcctatcatttgatggaggaatttaaagcaagtccaagggaagggaagagagtttctaaaatctagaacttggatagtttaatttacctatcccaaaacagcttaggcccagacagcttctctccaagattggtgccaaactgaaattaccagctgtgtagaccaaagagaatttcaaaagaaactgaatcccaagagaaaaaaaaaagacttctggcattgtggcccaataaattggtaggattgttgtgacttttcaagtttacatgtaaaatgggcccagcgcagtgcctggcaaatatgggtactaagtaaaagtaactataatcatgtttttttaatctggacttcacttggtcatcctttaaatggtgtctgacagaatcctagttcttgtctcactttacttagtttccctgggaaatttcatgtgtccttttggctttaattaatatctctattttgatgacctccattatctgcctattcccagagctttccacctgatatctcagcacatgaaaagcaccttatgtcaataagtgagttccttccctgccccaccacatacctgtcctgtgttcctaattccactgaatggcatcccatcctccagtttcccaaggccaagacctgggactcatctttcactctcaagttcctccacgggtacccacatgtcacatcctgtcaatgctgtccctggggagtatctgaaatatattcacttttcttcatttccacctgacaccactattaacacttgcacaaatttctgaggttcctggctcatttccctcattgacccccaatagttcattctgctctttgcagctctggtgatctttccaaaccccacatctgatcacttgtttcttcccttcatatggctccttaatgccttctggactaagtccacactgcttaaggtggcttaccaggtccttcatgattttgtctttgtttggctttctacactcactgcccaacttccccttacttcccatgattcagttatactgaatttctttggttctctaaagcacatgtgctttctgttctgcagaggcttttttgttcacttgctattctctacctgggaaactcccccagcccttcactgcctccttctaccatctttcaggcctctccttacacatcacttctttccaaaaatctgccttgacactccaggtctcggtttcctaggtgtaccctataactccacccctttcatagcatttctcactctggctggagatttaccttttaacttgtccatgtcccccactggagtggaagttcctggaggtcagggattatatcctattaattgttgtatttccagtgcctagagtagtcttgcatacatggatggtattcaataaatattggttgaatgaataaggagttctttcatttcatatgtaatagatcatggaaatagccttgtgattgatacacagcaggtattaccatcctcactttagaatgaggactcagagccttgagatgtctgagggccttgactgggacagctggcagatgcaggagcagagctgcatcacccctgtgggctatctcagggttgtctgtaatctaagtacaatgtctgttgattttggactgaaggctttttgggtaattgtttgctttttcaatacttataaaatagtttccatccttactcattgatagtaaggttagttattttagaaaacaagctaaatagcagaaatagtggccttttaagttgaaaatttaccctgaaaaatctacagagtagcaaacagagtatcaaaaggagttgactgtatctatttttataactgccacttatggattattcagtaaaaccacaattcacttttatgattttttttcatgtttctctgtcacaagagcaaactcttgctccataataacattccagaatacagcaatagcaaaagtcaacattttgaatcctttacaaactcttagacatttttttttttttagtttaacatgttacaaaacaaaatttcttcttttttcacagcagtttgggaagtacatactatttattagctcatcagcatgaagctggaaaattctttttcctaaagttctttatatctacaaactgttgatgttttcatttatttatttttaatgctacgttgtaatgaaaatcattggaaaactttagattctagtaattttgaagtcttcttagtttggacaggactgagctaaagtttgtactttttttaatttattgaaaaatggtttctaatgatagtattaacaagattatattgggggcaggacgcagtggctcacacttgtaatcctagcactttgggaggccgaggcggttggatcacctgaggtcaggagttcaagaccagcctggccaacatgtagaaatcccctctccactaaaatacaaaaattagctgggcatggtggcaggcactgtaatcccagctacttgggaggctgaggcaggagaattgtttgaacctgggagtcggaggttgcagtgagcccagatcgcaccactgcactccagcctgggcaatagagcaagattctgtctcaaaaaggaagaaagaaagattatattggggatatatatgtgtgtgtgtgtgtgtgtgtgtatatacacacacatatatatatacatatatacatatatatacatatttaaaggataaaggattctgctgccacagatcactaaatcagatgatctctagcaatttcctgtttgtttgttttttgcccatagtgcttatctctttgaacagtaattttccacttactatttttctccccttttggaccataatttcctttaaggcagagcctcctgttactcatctttgaatctggggtctgtcagagtacctagaatttaataaactctcattaagagccagttgaaagaatatatgactaagcagtcatttacatccaaaagatccgtaggagaattcttatcagcacatgtgattggtaacaataactttgtacttttcaaaaacaattactaatctatcttgctttccattatctcaccaaaacctattagcatgtctggcagaaaatagatacttaataaatttcttaaatgtttactgacttcaattttaagttttattaactatgttgacttttctctaatgaagatgattctaaaaagctttttactatacttcacagtgaataaaacagtgagataggaatattgcaaaatgtcccctgtgttggtcagtcttagtgtcattcattttaaaaattctgttctctaaatattgacagttatatataaatttatgtaattgtttacttctaataaagaatttcatctggggaaaaacatactttgctcagctctttgccacaagtgcaaagtctaagacagtcaaatagctttcctagtacggccttaggaacttagtatatgactggtgtgaatctagagggagcatactgcattctgaccaaaatctccaccctgttactatggccatcactaacttcgcagtattgcagtacttcctgctagcttagttcccaaggcaacttgtgaaggaaaatttttacaaagctgttgtcacacaaaggtagtgtttcagttcctgagcccatgtccttggagttgcccaggctccaataatactaataattactgtacattaggtacttaccatgtgccatattctgtgggagccgctttccacaaattatctctggtaatccttgtaacaaccctttgacatcaatattattattttctccatttttttacatatgagataaatgagacttaaaataatgtgcctgatatcatcagcaaatgagctgaggagggcagattcaaagctgattgtgtttgactctagagctgcagtcttaagccagaccttttcttgctggttaattttactgaaaaaaaaaaaaaaaaaaaaaaaccctcaaatactgctgattgatctaaagtactaacatttctatcagtgttagggaaattttaattttataatttgattttgtgagaaatttatagcatcttgaatactcacatgcaaagtgatatgtcttagataacattttacaatggcagagcttaagccagtgctcagtcattcattcatcctcaagttttgattcatttatcattcatcaaaactctgttttgtttggccacccacattctaggagctcagtacatatttgataaatgaatgaattgttgaggttgacagttacccaggactggcattaggaacacagagctgaagagcacgtttttaccctcaagaagcttacagtctaacgagggaacttgcacaaatactactatcactaggtgcctggttgaatggcttaagagatgatcagggatattcagaaggatatgtcaggctcagcaatggcatcacttgagagcatcaaggtgtttagggaactacaagatgtttggttctgctgggaataagagtgaagggggctccatttggatgcctcatacaccaggtgagagatcttagattttattccaccaggaggagaactaccataggatttaaaacagaaatgatatggtcaaacctacatcttaggaagatccctggggtgtttgtatggtggacttgcaatttgactaattgagatttgtaggatgattcttaagagatgatgatgacccagactgggatcactataatagagttggtaaggaggagaatgatttaaaaagtagttggaagaattctagggatggagataaacatttgaaaattattaacttataggtggtcatcaataccctgaaaatgactgggatctcagaggagagtctggagagttggaaatgacaaagactaatattcaagggggcaggaagagggagagttgttcacacatgacaataggaagaaatggccatagagtgtgtggtttctctcaagccaaggaatagatgttttaagaaaggaaaattcttgtggtgggaagcagtagagatgacagatacacattaatttcttgagatttctagatgactaaatgggcagatgttgaatgatagctaaaggagaacccagaaacaagggagggattttgtttttgttttttaaaaaagatagaccatagcagcttcatagactgaaacaataaaaaagttgaaggcacaaagaaagacacaggtcctctaactccctgcccagtgccctttattcatattctcagcacttgtatttctaagttttatgtttgagtcttcggggatacatcagagtagtcccccttgtctaataaatgtgtttacatttcctgccataccagaaacccttctcaaactttaatgaatttctacaaggtgagattactttaatgagaaaccaaccaaggaaaggagtatcatctgcaatatactttcaaatgttttttgcttgtttgtttcttgtccagctaaaaaaaaaaaaaaaaaacaagccattggtcctaacacaactttcatattctaccccaatatcaaagaggcttaaaatctcctggtcgtgtgatgggcacacagttaattttttgtgaacaaacacagtgttatgggccatttctgaatttatctctgaaatcataagattctttctgagccattatctcattctatattacagtcaggtggagcccatcttacctcctcatactaaattctagacttctcaagggcaggagacaatcatctgtatatctctttggccttcatacactcaggagtacttgccaaaaataaacatttaatgcacatttatttgaataattgataagatccaatacttcaataactttgtcatatttttatagaatgggtttctatatctcatttgcattttcaaactttacttttactgtctagctttaaaaaaaaagcctttgactctaatacagccctcatattctaccccaatatctaagaggctttatatctcctagtgttgtaccactattttaactccagtattttttacttcatagttttacctatttgttacagttagtttttatgaattcaagagatgaatagcaattttccatatgtaatttaaaaaaccccacagttgactattttatgctatcttttgtcctcagtcatgacagagtagaagatgggaggtagcaccaaggatgatgtcatacctccatcctttatgctacattctatcttctgtctacataagatgtcatactagagggcatatctgcaatgtatacatattatcttttccagcatgcattcagttgtgttggaataatttatgtacacctttataaacgctgagcctcacaagagccatgtgccacgtattgttttcttactactttttgggatacctggcacgtaatagacactcattgaaagtttcctaatgaatgaagtacaaagataaaacaagttatagactgattcttttgagctgtcaaggttgtaaatagacttttgctcaatcaattcaaatggtggcaggtagtgggggtagagggattggtatgaaaaacataagctttcagaactcctgtgtttatttttagaatgtcaactgcttgagtgtttttaactctgtggtatctgaactatcttctctaactgcaggttgggctcagatctgtgatagaacagtttcctgggaagcttgactttgtccttgtggatgggggctgtgtcctaagccatggccacaagcagttgatgtgcttggctagatctgttctcagtaaggcgaagatcttgctgcttgatgaacccagtgctcatttggatccagtgtgagtttcagatgttctgttacttaatagcacagtgggaacagaatcattatgcctgcttcatggtgacacatatttctattaggctgtcatgtctgcgtgtgggggtctcccccaagatatgaaataattgcccagtggaaatgagcataaatgcatatttccttgctaagagtcttgtgttttcttccgaagatagtttttagtttcatacaaactcttcccccttgtcaacacatgatgaagcttttaaatacatgggcctaatctgatccttatgatttgcctttgtatcccatttataccataagcatgtttatagccccaaataaagaagtactggtgattctacataatgaaaaatgtactcatttattaaagtttctttgaaatatttgtcctgtttatttatggatacttagagtctaccccatggttgaaaagctgattgtggctaacgctatatcaacattatgtgaaaagaacttaaagaaataagtaatttaaagagataatagaacaatagacatattatcaaggtaaatacagatcattactgttctgtgatattatgtgtggtattttctttcttttctagaacataccaaataattagaagaactctaaaacaagcatttgctgattgcacagtaattctctgtgaacacaggatagaagcaatgctggaatgccaacaatttttggtgagtctttataactttacttaagatctcattgcccttgtaattcttgataacaatctcacatgtgatagttcctgcaaattgcaacaatgtacaagttcttttcaaaaatatgtatcatacagccatccagctttactcaaaatagctgcacaagtttttcactttgatctgagccatgtggtgaggttgaaatatagtaaatctaaaatggcagcatattactaagttatgtttataaataggatatatatactttttgagccctttatttggggaccaagtcatacaaaatactctactgtttaagattttaaaaaaggtccctgtgattctttcaataactaaatgtcccatggatgtggtctgggacaggcctagttgtcttacagtctgatttatggtattaatgacaaagttgagaggcacatttcatttttctagccatgatttgggttcaggtagtacctttctcaaccaccttctcactgttcttaaaaaaactgtcacatggccaggcacagtggcttacatctgtaatcccaatactttgggaggctgaggtggggggattacttgaggccaggaattcaagaccagcccaggcaacatagtgaggccccatctgtctttattaaaacaaaacaaaactgtcacagcttctttcaagtgatgtttacaaattccctatggtttagtcacaaggaagttctgaggatgatgtatcacgtcatttctgttcaggcttttgagcctcctggaggtaaatggtttccttactgaaggcttgttattaccatgattatcactaagcttgaagtaacaaattaggggggcagactcacaacctcttgccctgccatggacaagttcaagaatctaagtaaagtcctctattgtctgatcttggatttgctcaacctgaacaagccaaggaggtgtattaaactcaggcacatcctgaccaatttggaattcttaagcttcagatcactgtggaagaggctcaactctttatggtgctgtagacttacgctcattttctaggtaatttataagggacctaatattttgttttcaaagcaacttcagttctactaaacctccctgaagaatcttccagctgctgagtagaaaatcacaactaatttcacagatggtagaacctccttagagcaaaaggacacagcagttaaatgtgacatacctgattgttcaaaatgcaaggctctggacattgcattctttgacttttattttcctttgagcctgtgccagtttctgtccctgctctggtctgacctgccttctgtcccagatctcactaacagccatttccctaggtcatagaagagaacaaagtgcggcagtacgattccatccagaaactgctgaacgagaggagcctcttccggcaagccatcagcccctccgacagggtgaagctctttccccaccggaactcaagcaagtgcaagtctaagccccagattgctgctctgaaagaggagacagaagaagaggtgcaagatacaaggctttagagagcagcataaatgttgacatgggacatttgctcatggaattggagctcgtgggacagtcacctcatggaattggagctcgtggaacagttacctctgcctcagaaaacaaggatgaattaagtttttttttaaaaaagaaacatttggtaaggggaattgaggacactgatatgggtcttgataaatggcttcctggcaatagtcaaattgtgtgaaaggtacttcaaatccttgaagatttaccacttgtgttttgcaagccagattttcctgaaaacccttgccatgtgctagtaattggaaaggcagctctaaatgtcaatcagcctagttgatcagcttattgtctagtgaaactcgttaatttgtagtgttggagaagaactgaaatcatacttcttagggttatgattaagtaatgataactggaaacttcagcggtttatataagcttgtattcctttttctctcctctccccatgatgtttagaaacacaactatattgtttgctaagcattccaactatctcatttccaagcaagtattagaataccacaggaaccacaagactgcacatcaaaatatgccccattcaacatctagtgagcagtcaggaaagagaacttccagatcctggaaatcagggttagtattgtccaggtctaccaaaaatctcaatatttcagataatcacaatacatcccttacctgggaaagggctgttataatctttcacaggggacaggatggttcccttgatgaagaagttgatatgccttttcccaactccagaaagtgacaagctcacagacctttgaactagagtttagctggaaaagtatgttagtgcaaattgtcacaggacagcccttctttccacagaagctccaggtagagggtgtgtaagtagataggccatgggcactgtgggtagacacacatgaagtccaagcatttagatgtataggttgatggtggtatgttttcaggctagatgtatgtacttcatgctgtctacactaagagagaatgagagacacactgaagaagcaccaatcatgaattagttttatatgcttctgttttataattttgtgaagcaaaattttttctctaggaaatatttattttaataatgtttcaaacatatataacaatgctgtattttaaaagaatgattatgaattacatttgtataaaataatttttatatttgaaatattgactttttatggcactagtatttctatgaaatattatgttaaaactgggacaggggagaacctagggtgatattaaccaggggccatgaatcaccttttggtctggagggaagccttggggctgatgcagttgttgcccacagctgtatgattcccagccagcacagcctcttagatgcagttctgaagaagatggtaccaccagtctgactgtttccatcaagggtacactgccttctcaactccaaactgactcttaagaagactgcattatatttattactgtaagaaaatatcacttgtcaataaaatccatacatttgtgtgaaa

SEQ ID NO: 10 - DNA, 46837 bp, Homo sapiens
  source 1..46837: mol_type = genomic DNA; note = CLRN1_gene
aggagatacttgaaggcagtttgaaagacttgttttacagattcttagtccaaagatttccaattagggagaagaagcagcagaaaaggagaaaagccaagtatgagtgatgatgaggccttcatctactgacatttaacctggcgagaaccgtcgatggtgaagttgccttttcagctgggagctgtccgttcagcttccgtaataaatgcagtcaaagaggcagtcccttcccattgctcacaaaggtcttgtttttgaacctcgccctcacagaagccgtttctcatcatgccaagccaacagaagaaaatcattttttgcatggccggagtgttcagttttgcatgtgccctcggagttgtgacagccttggggacaccgttgtggatcaaagccactgtcctctgcaaaacgggagctctgctcgtcaatgcctcagggcaggagctggacaagtttatgggtgaaatgcagtacgggcttttccacggagagggtgtgaggcagtgtgggttgggagcaaggccctttcggttctcatgtaagtagcaattgcatttgagttatttaatgctttaggcagactcttcccagtgttgcgaggaattatatttgagaattttgccgtgtttactgcaggactttttaaatcggtgtgaaccatatgaaaaacctatgactctgagcaatttcttcttcctagtttttattattttatacttgctttttattataatatagagttaattcattgttacataattaaggtttttggaaatattggcaattaagatgcttaagtattaatatttatgtaaaaaattatggagtctttttaaaaaagtaaacttggggaaataggaaagctgtaaagaatgatctttatgctttttgttctttataaaaagaaccaaggtcatgggctccgtatttaaccaggttgccacctttctcatgattttgtttcctgctccccactccctcccattattcctgctaagacctttcctgctgctaaatattcagttttcatttttaactaatttggaatcatttggctatagaaatttaaaatgatctgctgtgctaactgggaaagaaatggatgcctatttagtatagaacattttaaactgattgacctgcaaatcatgtagagaatatgagagagattttcttgttgtgatttttgtgaaatggaagtgtaatccacagtatttataacctgtttatcttaagaagagaatttttaaaaattaccatgtgaataggcaactcattaaatgaaaattaataggaagtcatttgttatatctcttacaacacacattcagaagttattattatttcagaagggctggtttggaacaaccttatgaagacacagtcagtaaattactgcataaatcactcttcaggaaaggaggttaccaactgaagcatttaaaatgaattattattttgcccaggttttttttttctttctagtataggtagaaggctaaattaattgaatttattattaacatatgcagtgcctaattaaatttcagtgctggtctatttatatttctgcaacattccttatatcttcttagcagtcattggacaccaaccttcagctcacataggttactaagtgatatgaattttcatagggctccagaaaatttccaagaattggttgttagctttttaattgatgaagtggataccagttcttttcactgaatggcttttattcattaaggtaatggggctgttagagttgcttagttttcctggggaaggggaaggaagaaaacaaagcagaatgtcatgtgatatgcaactgtattaaaaaaccgaaaaggaaaaaagttgagagagatgatttaaccgtgagtcaccggcagccaaagcgtgagtaaagcttctcacagatgaatttagacaaaagcggagaaggtactggtgaattttctggagcctttacattttctacagtgaaatggagataaactttactcatgccataggacatgtttcaaaacaataataagatgttttctgaacacttactacatactaagcactttatatgctttgtctcatttaatccttacacagccacattcttctggggtttagcgaatgatttttgtggttgtgtcctatgcttgtcctgtctaaggatgaagttgttctaattgggtgcccctccttttgctttctgtgaggacttgcagaactggtggggtttaaacagtaccctcacttatctcacagaatttcattagctcccagatacccctgacattctccccctagcctagtgaagaaaatcttccatttacttgttcattctgcagtgacagctccatcaatatacaatagactatacatattaagtgtactgtatatactatacatgttaaaaatctcattcattttggtgaggcccagctaagaatacttacagtagagcttttttttttttcctaagcataaaagtatctttttcaatgcagcatgagacagagttgggaaaaccaaaataaatagatccaatggactccccaaagaggataatattcatttaaataaacacccctctcagtgttaaaactttctaatcaacatgcctttgggacacattgcaccctcaaagtttacactcccattgcaacgcagctttgtggttcacgttttttccattcagaatgtcattaccctgtcaatgatgtttcatcaacgtttgcttggatgagaatcctctgatattcttcctgatagaaatgtataagccctgttcatataaatgaataaaagatctaaccttactttctcagtagtggcttccttggagcaaaaagcagggacctccagagagctcaggtggatgactcttttctgtttcttccagagctcaacttacaattagtgcacaattcatttcccagaatgtcttctttcttattgtgcctttagaaagttattaagcaaacatttgaattcacagaatcttaccagtgtaagaggaatggaaaaggtaacttatcaaggtaacaatcacttcgtggccagttttttcggctcactgcaactacccctcctgggttcaagcgattctcctgcctcagcctcccaagtagctgggactacaggcgtgcaccaccatgcccagctaattttttttttgtatttttagtaaagacagggtttcaccatgtgggccaggctggtctcatggcaagttttctttgtgttgtcatgttattatcaattaataggaatttatatttcagttctgttaggtggataaacactattttgcatacctaaatgtttcatttatatcagcactggccaataaaaatatactataagcaggccgggtgcagtggctcacgcctgtaatcccaacttttgggaggccaacactttgggaggacacagggtcaggagatcgagaccatcctggctaacctggtgaaatcccgtctctactaaaaatacaaaaaattagccgggcgtggcgggggcgcctgtagtcccagctacttgggaggctgaggcaggagaatggcacgaacccgggaggtggagcttgcagtgagccgagatctcgccactgcactccagccttggtgacagagcaagactctgtctcaaaaaaaaaaaaaaaaaaaaaaaaaaaaaaatatatatatatatatatatattacaagccacaagccacatatgtacttttaaatgtcctagtagccatattagaaaacaaaagtaaaaaggaatagatgaaattaattttaatgatttttttaaacccaagatatccaaaatattatcattttaacatataattaaaaatttattgagatgttttacattgtttttttttttcttgacgctgtcttggaaatctagagtgtattttacatttacattacatctaattcagtctagccacatttcacatgctcatttttttgtgtgtggttttatggagcagagagtttaataggcaagaaagaaaagagaaggcagaagaaaatggctcccctgtacagagacgcgggggtggggcgctccaaagccaaaagaggaggtccctaagtatggtagacaccagccaggaatatatgcagtgtctggaggaggggatgtctgatttgcatagggtcacatgctcatttttatggctactgtattggtcagtacagatttagatggggatttgctctgaacaagttggtgattgatggtgttcatattttaattgaatttttcctgggttctgctgtacacttgtatgtgtgttagtttcatgtgcaatgcttgtgtcacttttaaaacccagatatatggcataacatgagaatgaaaaatggaccagaaaaatagtttggcaatgtagtcatgtttgttcctattaaatgttccctattgaccactctatctcttttaattataacaagaatctgccctgccagcatgcccagttacgctgggaaaacttctgcctcatttactctggctgattctcatccacttatgggtcagtggttcattttctagaggtcaccagcattcatacctagcatacaatttcattcattataatgaaggaatgttttcccttcaaagagacacaactagtgggcttaatttttcttgatatgtcacctgtaaaattttaatgatgatgtttaaactctaaatgtagccatcaagacaaaaactgcaaattttgagcctcagtgtgtgtgggtgggtttctgtttcggtaatttgaaacattgcagaatatcatcaaaatatgatacccaagaatcatatggtatcaatcattcctagatatactgatctattcattgccaagatagttcaatgagctggcaaaaacatatggaattattttcttaaaatgtgaaaaataaaatttaaccaatcatgtatcacagcttgcaactttagtcatactttgaaaagcattttaatttggacctcatgattgaaaatttataaaaagctgaacagaaattagttcacttcatattttagaaaagcagagtttctttactaaatgaggcatttgacccaaattggagagaaaatgttgaaactacttctgtgagcaagcaggtggcttctcaaacacatgttgggatgaaatggttgggcctcagggtctcagtgcctgtcactgagagttggcactctctatctccatggtctcctccaagtgtgactcttgtctcttgctgacctgacctgccccaagtgactcactggtcatgaccctgcacaccttgcgtctctcctatcaccctgccgatggcagagctacaaaggtctttgatgtagctctgtctgatatcctgtgtttccccctatggtctgtgtggaagcaggtatgggggtgtgtaaaggggaagcctatgaagttcatctgcaaagactacctggttaggggaggagaggaagaagctatatgcaccatttcaccagcaagcatgggctcttctgccttttagcttaggggtcctgttgtctagtctcactcacctattaaaacagtccagcaaatagaggttttgtttacctcccattaaaaaaaaagcaattaatggaatagaagataataatgtatgagaagcactattgtgaaagaaaaaccttcaacttctctcagccaaataattgcttcctcctctgtccttcccagaccttgatgtttgctctattatttcaaaacaactatattataaatatttgagaatgtgtatttccctgcaaggagatcttaatccccaagaaggcaggagctgtgtattattcatcccagtgctccttcaaaccagggcctcagacagtgcatggcccaaagaggtacttaataaacgtttggtaaactgacactattgaaattaagcaacctggatttgaggtgggtctctgccactcacaagagattacgctttgagaaaattccatcacttcattgattttcagttcttgcatctgtatatgggagacgatactaggtgatttctgacatctctcaccgtttaaatgctctgtgatctatacaacgaggggctcgctgttctagacaagttccttccagctttacagttgcataacccttctaatcttagtcacatgatgactccactgacagatttttggccaccatcattagacatgctgagttacgtgtgcctttgctctgatcctcaaaactcatgatttttaaagttttctgaaatatctaccatttatcaggatccagatggatttcatgaccaaagtggatgtttcttttctctcccattacaatcttttactttttgtgtgggaaattgcatgttaaagaaagggaaattgaagaatgggatgctttggaattctggcaagatggattagtgggttccagaaagtaggggcagccacaaataccgaaataaatgagatcgtattattgagaaagcacaaatggaagaaggtcaaaagcaagaagaagctgacatcctgcttcctccaatttttgctttctctgtttttccaagaaactcctcttccaagccttgctgaaaaactccactttcctaaatctaacttcttaaactgataatggcaagaagttaggaatgaccaatatgtttaacactccaagagtatttgttttgttttgttttgagactgggtctcactctgtcgtccagcctggagtgcagtggtgtgatcacagctcactgcagccttgacctctcctgcccaaggaatcctcccacctcagcctcctgagtagaagggaccacaggcatgtgccactacacctggctaacttttaaaaaatttttttgtagagatggggttgcccaggcaggtctcaaactgctgggctcaagcaatcctcctgcattggcctcccaaagtgctggaattatgggcataagccactacgcctgacctctccaagggcattctttacccagaagaggaacttggcagaacttatcctccaattggtgaggaatatggagaaaatgactttaagcaaaggaacttctggttctgcctacctaatccagaaaaagaagttttatttctcccttcccctagtaactatcttcccatattcacataaaaaagtacagaatcaacattgttcaagaattataattttacttgtaagcacatgtgcacacgcacacccatataccttccttccctttaaatcatcccacaccctaatagtagtaaaatcattgacccgagcatacctgggagaggaagaggagtctgacaggggcaggttctaagtggcactcctggaacttaaccctggtgtatatgaactttacctattgaaggatgactcctcaactgttctcacaatttgctgctctgctttcttttctaatttctgaaggtgactcatcttccccaaggactttcagacttctcagaagaaaaaaatattgggtgggtctctgccactggcaaaagattagactttgagaatcataaaagtatatcagtatatactcattaatattgaattactataattaatattatgatattgatataatgatagaatgatattgataaaagcaatattcaataatgaatattatttcagctgcccacttattgggtgcctcataggtgccaggcattttgtatgtattatctacaacccttacatgggacatattatgatgctgtttctcttgaagaaatatggaaactggaaacagagaggtcaccacaattttccaaagtcacatagctaataggtagcagacttgggattcaaattcatatgcatatggtaaatcatgctcttcctctgctacattttgcccccttagaatatgaaaaagggatacaaagagatgaagaaaatatgtaagattatccttcaatttcactatcttttttaaagttttttttattatactttaaattctgaaatacatgtgcagaacatgcaggtttgttacataggtatacacgtgccatgatggtttgttgcacccatcaacctgtcatctacattaggtatttttcctaatgctatccctcccctagtcccccacccaccgacaagccccggtgtgtgatattcccctccctgtgtccatgtgttctcattgttcaactcccacttatgagtgagaacatgcggtgtttggttttctgttcctgcgtcagtttgctgagaatgatggtttccagcttcattcatgttcctgcaaaaggcatgaactcattttatggctgcataccattctatggtatacatgtgccacattttcttaatctagtctatcattgatgggcatttggcttagttccaagtccttgctattgtgaacagtgctgcaataaacatatgtgggcatatgtctttatagtagaatgatttataatcctttgggtatagacccagtaatgggattgctgggtcaaatggcatttctggttctaggtccttcaggaattgccacactgtcttccacaatagctgaactagtttacactcccaccaacagtgtaaaagcgttcctatttctccacatcctctccaacatctgttgcttcctgactttttaatgattgccattctaattggagtgagatggtatctcagtgtggttttgattagcatttctttaatgacaagtgatgatgagctttttttcatgtttgttggccgtataaatgtcttcttttgagaagtgtccgttcatatcctttgcccactttttaacggggttttttcttgtaaatttgtttaacttccttgtagattctggatattagtcctttgtcagatgggtagattgcaaaaattttcttccattctgcaggttgcccgttcactctgataatagtttcttttgctgcgcagaagtttttttagtttaattagatcccatttgtcaattttggcttttgttgccattgcttttggtgtttagtcatgaagtctttgcccacgcctatgtcctgaatggtaatgcctaggttttcttctaggatttttatggttttaggtcttatgtttaaatctttaatccatcttgagttaatttttgtataaggtataaggaaggggtccagtttagttttctgcatatggctagccagttttcccaacaccatttattaaatagggaatcctttccccgttgcttgtttttgtcaggtttgtcaaagagcagatggttgtagatgtgtggcattatttctgaggcctctgttctgtttcattggtctctgtatctgttttgatacaagtaccatgctgttttggttactgtagacttgtagtataatttgaagtcaggtagcgtaatacctccagttttgttctttttgcttaggattgtcttgactattcaggctcttttttggttccatatgaaatttaaagtagttttttctaattctgtgaagaaagtcaatggtagcttgatgggaaaagcattgaatctataagttactttgggcagtatggccattttcatgatattaattcttcctatccgtgagcatggaatgtttttccatttgtttgtgtcctttcttatttccttgagcagtagtttgtagttctccttgaagaggtccatcacatcccttgtaagttgtattcctaggtattttgttctctttgtagcaattgtgaatggaagttcactcataagtttgctctctgtttgtctgttattggtgtataggaatgcttgtgatttttgcacattgattttgtatcctgagactttgccgaagttgcttatcagcttaaggagattttgggctgagacgacagggttttctaaatatacaatcatctcatctgcaaacagagacaatttgacttcctctcttcctatttgaatacgctttatttctttctcttgcctgtttgccctggccagaacttccaatactgtgttgaataggagtgttcaccacctattttaagaatagtattgaagcctcacaaaagctggttctcatgtaaccatctgagaatatttggccttatgacttgaattcattcattgcctttttatttcacattttagtgatcctgatgtctaaatcttaatctttgatccttgcaaggtaaaatagccaagtcaagcctgtttaataatattggttgaggaagtcacatgcttatgatcaatctttgggttatgtaattatattaccttaatgttggcagtttaggtgtaaggcagagatatctgatcacatgtgtggttagctaatttaagatcactgccaactaaaatcttcatggtatgatcttcaaagttagctactttgaccacagcaatgatttcaccacagcaattaacaaaatggcagactctttcctgaggtggcatgaacagttttaaaacaaagtcaaggaccaaaagaaaagcaggcacatggcatttgattcatttcaaaaactagtattgtattaagagccaaggggatagaattgtagcatcaattaaaatcttgtttgaaaaaaaataaaaacaaacgtccatttttatctctcaaatatattagggttttcataaagttataggtgtatttttaaaaaaacaaaactcatatacattagactgaaaaatttgcctgtcatctcatcatgcagctaaatgcaattgtctatggcgagatacactcttattagaggtatgatagcactaactaatagcaaactttgtacctggtagtctaatttatgcagggttcatatttcgctccctctcagcatgctgtaactgtggcaaagccattctcaggagttattaccccaacataatcatacccctgtggattaggagcagttaaatgggtcctgttatcagagacacatatgtgccacagccgctgtcatccctaagccaccgtgggtgattaagactcactgatgggactacctctgaataggcttgagtgaggtggatacacttcagctgagagaaattcaggtaaggggctgagaaaatcagattttgaatggttttatcataccatcaggtctccttttaagtgctggggtcatggatttcattcaacctgaccacatagcctttggaagcttggctcaatacctgagtgtgagattatgggtgatattaaaggagatgaatgcattgagctgatgtcagagaatgtcttttactggattttcataatgactggctgcagatgggctgaggggaaagtcagatcaagagcatttctgtaagaagaaagaaatcttccctcttattctctttcaagaaaatgaatagctgagcaccaagaggccaaatacttttttaaaaaacacatccttttatgtagagaaggacaggttgagacgaaaaacaggacctctgaaactgtctttatagctttaatctaggaagaaattgcggcaccattgctgacatcattatcagaggctgccttagttctgagagcttcacagatggccttttctgcattttacatctggccagatgaaggcaaaaaggttgatgaaaccaaaactattagatcagtggtccataactctggctgcactttagaatcatctggggagtccttaaaactactgatcctgaggctccatcccagaccaattgaatcaggatctctgggggtgggacctgagcattggaatgctttaaaagttcctcagggactctaatgtgcagccaaggctgagaatgactgaggtggatggtggccaagacaggtgaggccaagagttagaagcccttactgttagggaaggcagaagccacaaggaggaggggagggggaaggagcagtatttagcatttcttccacacagttggggggttttctgatcaaaattaggctgggatctttcgcttccattttcatgaaggtcttatgctttgtccacagccacctggcctcagggcaatgagcaatctgattgatgaattttcagtaagaaactgagcacacttggctctcagccccagtggcttcccctgtttccaaatctgcccaccagttacaggagcctgctcaccaactggttgggttaaagaagtcggctctgtccttggcagggaggccttcagctgtctggccctgtctgtgactgcgtgggtgaagctgcctaatttggggaacttgatggaagatctaagctatgttctctaacagttttatcagaaataaagttaacttttgacctccatctgcctgtctcctgtggaagggctctgctccttccaaagagactctcaggggttctccttagaggtgtgttatcagtccaaagatcattttagaccagccattacagaggatgtccaagaaattgcacaagggaaatagaagtaagaatgagagcaatatatcagatagtaaggaaagtatgtgactggtttcaaataagtaattaaccataaatccaaagttcctgcattagttatagcaatagtcatccacctggtcaggaaaaaaaaagtaaaagactgagctgcaagatagaaagtttgcctgaattccacgtacttcaaggactactatggaggattccttggtcccaatgcagagacatgtactctgaccacccatgggccaaatccctcttacccaccctcagtgattcctcctgggacctcactacattgagttcttacattccccactcttttcgggggaaatataacccttctgctcttctcatgatgttaaaaatatttagacaattacttaaaatttacaacaatcttccacataaatgatctcacttatgtttcttgtgagctctgtgatttatttctattatcatctatgctgatagttaaggaaactgagatatcgagaccaacatgcatagtaaatggcaaaaccagatgaattttaaactttcctaactccaaaagccacatcctgcccaacccgccatgctgccgctcagttaatgcctggctgtttgtctccccattggcccctctacccattgtgctttgatggcacactgtattccaactgcctgagactcctggttaatgccattacgtacagacttaggttgaatttactaggatttttaagatttgtaggataagagatatgactgttagactggaatcagcaatagataaaaggttaacaaagtttcagaataaaatataatagaaaaccccagcagatagaagtaaaatgaatggtaagacaactgaaatgaaagccatacatttagaaatatcaaataaaacacagattaatggcagacaataaaggaacatacttagcagttagtaaaaacactttttaccttattcttattaccctccagtaaccttttttttttttttttttgagacaaagtctcgctgtgtcgtccaggctggagggtagtgatgtgatctcggctcactgcaacttctgcctcttgggctgaagagattctcctgccccagcctcctgagtagctgggactataggggcccatcactgcacctggctaatttttgtatttttagtagagacggggtttcaccatgttggccaggctggtcttgaactcctggcctcaggtgatccacccgcctcagcctcccaaagtgctgagattacaagcgtgagccaccaagcccggctgtaacctattgaaaataacattacttgacatgtgagacaaattatttgtaagttaaagagtttatgtgccttcaatgctcccacccttccctcccctaaaaagattattgagtgcccatgatgtgcctaagccttctggtagactctgagaatgtgaagagagttagaggatacttgttcaacaacccagaatctagcagaagtgttttgaaatgaccagccacttgggagagctatgctagcatatcattcaggatgggctgggtcatgttttaataacaagtaagtttgaactttataggtttgaaacaaaaaagatgtgtttcttgctcacagttcatattttttggagattggctggagcttcattccaggatactgccaccatctggaatgttgacagttaccgtaacagagaaagagttgtggaggctgtcacactggcaattaaattcgctgacctggaactgacacatgccacctccacttatattttattggccaaggcttgttacacagccacatctaacttcagagaggtcaagatgagcaaatcctaccacgagctatagatggatgagtagcactcattattatcacaattattttatttgttataaaaactccaagaaggagaggtactctatgtgaggaataggcataggaaaatcagagggaagttcttaaagatgagctagatttcactagatggcattgaagaaacattccaagtaaatgaacagcataagcaaatgcatgaagaacttattgtggtcctagtacagacgatgcgtgagagtgtggaggagggaaaaggtaagactggagaggaaggcaggaaccagaacaggacagactgtgttcactgtcaggcagttaagtctatcttgtaggcaacatgaagccttttaaggaaggcaagcagctatgtgacaggacagaagatggattggaagaaaatcaaaagagaagtggggaccagtcataaggctcctccaatatttggggatccaaaccaaagcactggcagagaaatagaaaggaagggaaatatttccaaaatattcaaaacagaaaccaagagaacttgatgacagaagatgaacccaggtttctactgaatggacagttgttacattctctgagataaggaatacagaaggaaaaagttgagagggaatatgaaattatttttaatcatgtttaatttgatcacttgtggaacatcaaccagagatgtccatcagttacaccaatttgtaggttttgagagaggcctgaggtagaggcagagaagtgggaatcagcagattagcggcagtagttggaaccataactgaagatgagatttcccagggaggggagttgaacaggaaggtagacaaaggctgagtgcagtggctcatacctgtaatcccagcactttgggaggctgcagtgggtagatcacaaacaagatcaggagttcaagaccagcctggccaacatggtgaaaccccgtctctactaaaaaaacacaaaaattagccgggcgtggtggcacacacttgtaatcccagcctcaggaggctgaggcaggagaattgcttgaacccgggaggcagaggttgcagtgagccaagatcgtgccattgcactccagcctgggcgacagagcgagactccgtccccaccgaccccctaaaaaagaaagtagacaaagatgtgtcctagaaaacactaatatgaatgggtagagaggggagacttgtcaaggagatcgaggggagagtcagtgaggtgaaaccttagaggatagaccttcaccaaggaagtaacagtcaacaggcctaaatgccacagagatgtcaaatgagagacactggaaatggttctttgaatattacagccagaacatcacaggagaccatttccaaagcagtcttgatgaagtggtggggaagggaggtccctgaaggagctaaggagggactgggagatcatgacccagagataagtgttgcaggtataaaagggaaagactgagatcaggaaatagccacaggatccctaaggccaggcttcgggtggggtggtgtgtgtgtgtgtgtgtgtgtgtgtgtgtgtgtataaaatgggaagaccttgagtataattctgtactaagaagatagagcagtagagaggaaaaggctgaagacagatgggagggtaaatagtgaattagaaaggtctgtgcaaagatgagaaaggatgagtctgaaagcacagggagaagggccagccttggacaggagaaaacatttctttcactaagaataaagggaaggttgggtatacaccacaaagaaggtgtagatgggtggcaatggagttctgtcaagttgagggcattccatgatagcctcacctttctctgtgaaatgagagagtttagtttacaagatatttctgagcacttcataagccaggttcatagactgaaagaagtggaggtggagtgtgataggtccttaagaataggggaagtttggaatatctgacaagggacagagaggaaaaaactagaaaaggctttgcagaatgtgggcccacagatcagaggctaaggggtccccatttgtgcaggagagtaagggcagggaggcaaggctcacagcccaaaatatagagcccctcaccaaatgactgcaggagggcagctttcctatgagagcatccctatcactgttttcactccgagtcattaacttacgacttactcagctctgtttcgtaatagcagactcgagtaatgagggtatgacagcctctctctgcatgccaaggtatgcagcgtggatttcctttttcgctttctctctcctgtggcttaggtgccttctgttctgctaccaggatagagaacccagtgactagtttcttctagctctctttttctgactaggtatcttgtcagaaatttctgcttaccagacttcatggagagggaatcaagctttgaatcagggttgaaaaagtagagcttaatatatatattacaaaatgccactcacgttcttgaggttaccttgtatctataccacaactagcattcttttagaaagcaccattaccgaagtaatccctttcctgggaattcacccaaaaaggttattcccacttatcccccatctccaaaataaaaaagaaaaatgtgtgtgcttagagatgttcctggaagcatgagctgtaatactgaaccaatagaagacgaactaacagattgcagggcatccgtttggcaaaaaacttatgcagttatctaaatgatagttatgaagacaatatgtataacacattatattctgagtgaaaagaacagaaggtgatttcaaaactgcattgggataatagtaatataggaaatagtgagatgaacaaagatttcaaaggaacaaaaataaagaaaaattttgctttttatattggtaggcgtatgggtgaaattccaattttaattttaatttcatagttataaaattgttcataaaaaaaggtcccccatagacagttgggctttgggacaaactaacagaaacagagtaggaagaaaattcatcttccttcaatcccctttctctgcttaaaacaaaacaaaaaagagctttgtcatgttcaggtgtgcaacgaattctttttccaaatctggaactttacatctgctattaaacaggagtcagtttccatgtaacatgttgacaatcccccaagtgtgttggaataattttttttaatgaggagatttgaaattccatttcaattgccaacctgcctctttcaacttctaaaaacaaagtaaaacaaaacaaaaacacactgggtcctatcaccccctcttgctactactattttatctccattgccctgaattctttccaaacttctttccacccagctttgatttgttttcagtcgggtttattgaggcataatttacgtacagtaaaattcatccttcttagatttagaggtctatgcattttgactaatgcatattggcttataatgactaccacaacaaagatatagaacacacccatcactcccgggttctccctgtcccttttttggtccatctcctctcctacccccaaccccttggcaaccactgatctgttttctgtccttatcattttgctttttccaggatgttgtatataaggaatcatgcagcatgcagcctctcgagtctgacttcttccagttagcacagttatttaagatctatccgagttattgtgagtagcagcatcttttttattgctgactagtatttcatcacatggatgggccacaacttgtttatctgttcacctgtcaatggatactaagttgtttccagtttttggcaaatatgaataaagtaaacatttgcatacagatttttgtgtggacacatgttttcaattctcttaggtaaatactgagcaatgggattgctgggttatatgttaagtctatgttcagttttctaagttctgaaacaattggatatctatatgcaaaaatacaaaattaaccttgactcaaacttgtaccatacacaaaaaataacctgaaagagatcacaggtgtaaatgtaaacctagaactaaaaacttcaaggagagaaacatagcagaaaatatttgtgaccttgcattaggcaaagacttcttagatttgacatttgaaacatgatacataaaaaatcttgataaattggagttcataaaaataagaactactcttcaaaagacactgataagagaatgaaaatacaagccacagacagagaaaatatttgtgaatttcttatctgataaagggtttgtatccagcatgcataaagacttttcaaaactcaataataaacaatccaataagaaatgcacaaaagatacaaacacatcatcgaaaatgacctatgaaaggcaaataagcccacaaaaaaattctcaacatcattagacacttgggaaatgcaaattaaaacaacactgagataaactacatatctattaaatggctaccactttaaaaacctgtcaagtgccagccagaatgtggaacaagtaggactctcttacattgctagtgggaaggtgaatggtacagccactttggaaaacactccgcagcttcttatagttacacataggacctgggggtagaggatggattgactgtaaaggggcaaaacttcctggtaggggtggggaaagtttttagaagggtgaaattgttctatatcttgattattgtggtggttacacaactgtctgcatttgtcaaaactcacagaactgtacactaaaaaggtatatttttatgctctgctaattttactttaatcttaaaaataggaaggaaaaaataaaatcaatgccactgtgcgactttgggcaagttacttcacttctctgtgccttggtcttttgaaatctatacattaaggataaaataataccttcctcatactgttagaattaaatgtgctaatttatgttttatatatataaagtacttggccgggtgtggtgactcacacctgtaatcccagcactgtgggaggccgaggtgggcagatcacttgaggacaggagttcaagactagcctggtcaacatggtgaaaccctgtctctactaaaaatacaaaaattagctgggcttggtggtgcgtgcttgtaatcccagctacttgagtggctgaggtgggaggatcacttgaactccagaggtggaggctgcagtgggctccacccactgcctgggtgacagagctagactccatctcgaagaaaaaataagtacttgaaacatagcaaatgttttataattattggcttttttttcttattgttattacttgcattattgctgtttgaagaagtttggtgataatggagagaaaagggcaattaggggtctgggatggtttaagtatgaggagaccgagacacattgactcagagtgaagaaatcaaagataagagaatgaaagaaagggagggtaattctgaacgcacagacaaagttatgttactaacgtggcatcggctgtgtgttgtaataaataactccctttcacttgtcaatagctaatcaaatactttctggagaccagaagtgacttgctggatcaatgacaactcctccacagatcaaaatgttcaaatcctttttctgtgttgtaatcctaaatctaaaagaacagagagaccaagcaaatctacctcccaacatcattaaagtgacaactctcagtatttatttgaatggtctgctctcagcttcaaccaaggaaaagtcaaattagtgttggtcagaaaacagaagggtgttacgagagttctggctggtcattacagacttggggatttttgattaaaagaagaagaagaagaagaaacctgataaagtgtaaatatagcaagcagggattagtgtcctgctgggtcatgttctcacaacagtgagaatttcagagatttcataagaattaaactgctccacatgacaatttattttaccttctggcttttccaggaggcaaatcagtgcaacttctttctgcctttgtttcaatttggtaacaaccctcaattttaggacaggctaaacctagccaccctatcagagatgatgaagtagccatctttttaacaggtggggagatgaatggaatcagggtttgtttgtttgtttgtttaataactgctagtaaaaaccaagtcaatagctgactgagtgtaagggaggctccagaaggcaggttattgtagtatagatgtgactcgacttatgatgatgttacttcccgataaacccgtcataagttgaaatatcgttaaattgaaaatgcttttaatacaccgaatctaccgaacatcatagcttagctcagcctacgttaaatgtgctcaggacgcacattgcctacagctgagccaaatcacctggcaacacaggacactgtagagtatcggttgctggcccttgtgatgctgtgactgactgggagctgcgcttagtgcctctacccagcattgagagtttcttatcgcttattactagcctgggaaaagaccaaaattcaaaactcaaagtgcggtttctaccgaatgcttataactttcagaccatcatgatgttgaaaaatcgaaccatcgtaggttgggatccatcctataagacgagctacactgccggaagtgtaagactgctatgctgccggaagatggggcatagtggacaactgcaagtcctgacaacaggaggtcagcatctgcgacctttaacatccacattgacactaccacagtcttccaaacagagctgatgatatagtttggatgtcgtccctgcccaaatctcatgtcgaatcgtaatccccagtgttggaggtggggcctggtgggaggtgattgggtcatgggggcagagttcttatgaatggtttagcacggtccccccttggtactgtatagtgagtgagttctcatgcgatctggttgtttaaaagtgtgtggcacctcccctctctctctttctcctactctggccatgtgaagtgttggctcccgctttgccttccaccatgattgttaaattcccagaggtctccctagaagctaatgctgccacgtacagcctggagaactgtgagccaattaaacctcatctctttttaaattacccagtctcaggccgggcgcggtgactgacacctgtaatctcagcactttgggaggctcaggcaggaagatgatttgaggtcaggagttcgagaccagcctggccaacatggtgaaaccccatctctactgaaaatataaaaattagccaggcatggtggcgggtgcctgtaatcccagctacttgggaggctgaggcaggagaatcgcttgaacctgggagtcagaggttgcagagagccaaaatggagccactgtactccagcctgggcaatggagtgagaccctgtctcaaaaaatatatatatattacccagactcaggtatttctttacctgagactatgagagaatggactaatatagctgaagaattttattttatttttaaaaaacttttacgtttgggggtacctgtaaaagtctgttacataggtaaactcctgtcatgaggatttgttgtacagattctttcctgctcctccccctcctcccaccctccatcctcaagaagatcccagtgtctgttgtttccttctttgtgttcgtaagttctcatcatgtagctcccacgtataagtgagaacatgcagtatttggttttctgtccctgtgttagtttgctaaggatgatagcctccaactccatctatcttcctgcaaaagacatgatctcattcatttttattgctgcatagtattccatggtgtatatgtaccacattttctttatccagtctgtcattgatgggcatttaggttgattctgtgtcttcagaattgtgaatagtgctgcaacgaacattcgtgtgcttgtgtctttatagtagaatgatttctattcttctggtagtaatgggattgctgggtcaaatggtcgttctgcttttagctctttgcagaatcaccatactgctttccacagtggttgaactaatttacactcccactaacagtgtataagtgttcccttttctctgcaaccttgccagcctctgttatcttttgactttttaataaaaaccattctaattagtgtgatggtatttcattgttgttttgatttgcatttctctaatgatcagtgatgttgagctttttttcatgttcgttggctgcaggtacatcttcttttgaaaagtgtctgctcatgtcctttgcccactttttaatggggttgtttttctcttgtaaatttaagttcctcatagatgctgggtattagacctttgtcagatgtatagcttgcaaatattttctcccattctgtaggttgtctgcttactcttttgattgtttcttttaccatgcagaagctcctaagtttaattagatcccatttgtcaatttttgcttttgttgcaattgcttttggtgtctttgtcatgaaatctttgccaggtcctatgtccagaatgatattgcctaggttgtcttctagggtttttatagttttgggttttacatttaaatctttaatccatcttgagttgatttttgtgtttggtgtaaggaaggggtccagtttcaatattctgcatatggctagccagttatcccagcattatttattgagtaaggagtatctcctccgttgcttgtttttcccaggtttgttgaagatcagatggttgtaggtgtgtggccttattttggggctctctatcctgttcatttggtctatgtgcctgtttttgtaccagtaccattctgttttggttactgtagccctatagcatatttcaaagttgggtaacatgatgcctccagctttattctttttgcttagaattaccttggccatttgggctctttttggtaccatatgaagtttaaaatagttttttttctagttatgtgaagaatgtcgttggtaatttgataggaataacatgtaatgatattgattcttcctatccatgagcatgggatgtttttccatttgtttgtgtcttctctgatttcttcaagcagtgttttgtaactcatattgtagagattattcacctccttgcttagctgtattcctaggtattgtattctttctgtagtaattgtgaatgggattgcttttctgatttggccctcagcttggtattgttggtgtataggaatgctagtgattttttgtatcctgagactttgctgaagttatttatcagctgaaggagcttttgggctgagactagggggttttttagatatagaatcatgttctctgcaaacagatttagtttgacttcctctcttcctacttggatgccctttatttctttctcttgcctgatttccctggccaggacttccagtaccatgttgaataggcgtggtgagagagggcattcttgtcttgtgccagttttcagggagaatgcttccaccttttgcccattcagtacgatgtttgtggtggtttgtcatatatggctattattattttgaggtgtgttcctttaatacctagtttattgacagtttttaacatgaagcagtgtttaattttattaaaagtcttttctgcctctgttgagatagtcatgtggcttttgtctttagttctgtttatgtgatgaatcacatttgttgatttccttatgttggaccaaccttgcatcccagggatgaagcctacttgattgtggtggtttagctttttgatatactactggattcagtttgcaagtattttgttgaggatttttgcattgatgttcatcacggatatcggcctgaagtttctttttttgttgtgtctctgtcaggttttggtatcagaatgatgctggcctcctagaatgagttggggaggagttcctcctcctcaatttttttggaataggttctgtaggaatggtaccagctcttctttatacatctggtagagtttggctgtgaagccatcaggtcctgggattttttagttggtagggtatttattactgattccctaaatagaccgataatgattttagaagtggagtcggttttttcctggtccagtcttgggaaggtgtatgtatccaggaatttatttagctcttctaggttttctagtttgtgtgcatatgggtgttcatagtagtttctgatggttgtttttatttccgtgggatcagtggtaacattctcttcatcatttcttttttttttttttttttttttttttgagacggagtctcgctctgtcgcccaggctggagtgcagtggcgcgatctcggctcactgcaagctccgcctcccgggttcacgccattctcctgcctcagcctcccgagtagctgggactacaggcgcccgctaccacgtccggctaattttttgtatttttagtagagacggggtttcaccgtgttagccaggatggtctcgatctcctgacctcgtgatccgcccgcctcggcctcccaaagtgctgggattacaggcgtgagccaccgcgcccggcccatttctaattgtgtttatttgaatcctctctcttctcttctttattaggctagctagtggcctatctatcttattaattttttcaaaaaaccagctcctggatttcttgatcttttgaatggtttttcatgtatcaatccttcagttcagctctgattttggttatttcttgtcttgtgctagctttggggttgacttgttcttgcttctctaattctttcagttctgatgttagtttgttagtttgagatctaactttttgatgtggacatttagtgctataaatttaactcttaacactgccttagctgtgtcccagagagtctggtatgttgtatctttgttctcattagtttgaaaaaacttcttgatttctgtcttaatttaattatttatccaaagtcattcaggaacatgttgtttaatttccatgtaattgcatggttttgagcgattttcttagtcttgacttctatttttattgtaccgtggtctgagggtgtttgatatgactttggttcttttgcatttgctgaggattgttttatgtccaattatgtggttgattttagagtatgtgccatgtggtgatgagaagaatgtatattctgttggttttgggtacagagttctgtagaggtctattagatccatttggtccaatgttgagttcagatcctgaatatctttgctaatttcctgcctccatgatctaatactgtcagtaaagcactgaagtctcctactactattgtgtgggagtctatgtctctttataggtctctaagaacttgctttatgaatctgggtgcttctgtgttggatgcatatatatttaggatagttagatcttcttgttgaattgaaccctttaccattatgtaacgcccttctttgtctttttttttctttgttggtttgaagtcttctttgtctgaaattaggattgcaacccctgcttttttctgttttctgtttgcttggtagattttcctccatccctttattttggacctatgggtgtccttacatattttatctttatctatccatccagccatccagccatccattcatccgtatcatttttaaccaataaggacttttaaaagcgcaaccacaacaccattaacataaccaataaaatctataacaatgataaaatatcatctaatactcagtccatgtccaattttccctcgctatctcaaaatcgtcttcttagaaatggtctgttcaaatgagatcacatggacagaggaaggcgaacctcacactgtggggactgttgtggggtggggggaggggggagggatagcattgggagatatacctaatgctagatgacaagttagtgggtgcagcgcaccagcatggcacatgtatatgtatgtaactaacctgcacaatgtgcacatgtaccctaaaacttaaagtataataataaaaaataaaaataaaaaaataaaaagtgaaaaaagaaaaaaaaaaaaaaaagaaatggtctgttcaaatcacaaaccagattcagaaacaatagccatacattacattttattaatatgtctcttaaatttcttttaatctattacagtctttggaatttttatgtcttcgtttatccttccaattattaaaaaaaaagtatttttgtattcattgaatagacaatgcttgcagaaaagtaaaaaaaaaaaaatttagtacaaaaaggtacatagtgagctgttccttagtctcccttcccagaagcaatgttaccacttttgtacaaatagtctctgcctagacacacatgccagtccctaaggtggctgtaacaaggtggttaagagtgagaacatgaattcaaattcctattatgccactcactaagtataaatcttggtcatggtacatgcctctgtgcctcagtttttaataatggtacctacctcatagggctgttgagagaattaaatcagataagtgcttaaataactattaatatttattattattcacattcccttttggcttttttcccaaatagcagagtggtgcacatatgtcttcatttatttggcttgttttttcacctcacatcacattttgatgaataattccatacatgttgttatagatttgcttcattctttgtaatcattgactaatattccattgtatgaatatgctactgctaaacatgtacgttatttccaacctcttattatcaagaaatgctgcaatgaatatccttgtaatactttagtggattcatgtgcaaaaatattcataggataaaatcctgaaagttaaattgctgagctaaagggtatgtgcattttaatgctttatagattgcccagctgcctcaaaggaggttataacaatttacactcccaagaaaaatgcacaagggtccccatttccccataccctagctaacacaggatattgctaaatgctttcatctttgtaaacatgatgtattgaaaatggtatctcaaagttttaatgtgcatttttctgattgtgagaagataaaggaaatgtagtacaactaaacatcagcagtcaaatgacctggccatgactcctgagtgaggacactggtaaacaccatcaggatccaaacacctctgtatttacgaagaggatgctccctattggatagcactaagcttatttcatgtatgtacatatgtagttagttaattacatccagcggtggcaaagggcttgttctgacccaatgaaactttctctcctggcccccttccagcatgtggtcaggagtagagtgttgtggccatgaggcatgcatttgtacagatgactacttactcctccttgaaacatttttttccatttgcttccctgctgtctcactcatgggtctgctcctaattcacaaatcactcttttcccagtcttcttggttgggttttctcctcttctgtgcttgtagacatgggggagccccagggcttctctcttgaactacagcttctccctgggttcatctccttgggatgtctgttccaatgggtttaaatactagggctaggactagggagaggtcattgaggcacttagcacataaagtttaaggaaacattctttatcaggcccatgcaagtgcaggactggccctggagggtgactaccaccttaccttttccaccctaggcaccttgtttgccttaccctagccccagtcctctttaacaccccagtcttctccctggacctccagaaacataaatcctatttgacatttctacttggaggttttaaggtaactcaaacgtaaaatatctaagacagaactcttgcatcacttcccatcctggggcccaagcctgtctcttctactagtctatctcagttaacagcatcaccatttattcagttgctcaggacaaaaaatttgaagtaatccttgactcttctttttttttttttgagacggattctcactctgttgcccaggctggagtgcagtggtgggaccttggctcactgcaacctctgcctcctgggttcaagcaattctcctgcctcagtcttctgacctcgtgatccactcgcctcggcctcccaaagtgctgggattacaggcgtgagccaccgcacccggcctggattcttttttttttttttaaacaagtcctatcttccatctccaaaatgtatcccaaatctgacaacctctcccaccgtaggccagcccccatctctcccctctgaaaatagcctcccttagatctctggacatttgttcttccccacccccttgtgatcactattcagcattcagaatgatcttttaatattatgaaggagactgtgttcctctcctacttaaaattctctagtggcttcctaataaatttagaataaaaagccaactcctcgccatggtcaccaggccaggatccagtgggtacaacaatctgttcccagcacaataatcccacttctgcctccccaccattcaccaggctccactgcactggctcattcctgcctcagttgtgcttcttttccctggaaagttctttctgtagatctttaaagggtgatttccttctcaacattcaggtgtcagctcgtttcactttcctgaccatgcccatccactcagagatcactcaaaatcccattaccctattttatttctccatcatatgtatcactatctgaaactatcttgttgttgatgcaggctattttcttgaccccttcatgggactcccaacaggggtaccccatttactcagcctgccctgctcaacctcttgcaggagggagcacacgagtgaacgagtgcaggaaccagctggctgctttagtgctgtgaggagtaaactccatgcaggccctgcagcagcaaccaggtaggggtgcctgcaaccccagggccccagagggtgtgttacaatgctctcgtagctctgccatctgtggacagcagtgtgttgtcagctcagtgggccctttgcttcatcatgtagggtggctgccctctgcctgtgagggcaaagggccagggtgacagtctttttgggtacccacaatttgtgcatcctgaattcttgtttggtgcccaagaagaatggggtcacacagatgaactgaaggatggtgaatgcagagaattagcaatgaaagtggctctcagcagagagagaagctgaaaagggaatgggaagggcaggtcactctcccctgaagtcaagtcacatctctccaatgtccagccaccatctctgaagtcaagtttcctctctctgatgtccagccacttctcctctctactggctgagtctggggtatttataggcagaggataggtggtggggcaggccatacataattttggaaaaggcaacattctattggtaaaaagacattattcataaagaaccaattgggaaagagcgggcacacagggatggaagttctcactttgggctgcaggtttcaggcttttcagctcaaaagtgaggtttttccagggacctgccccgtctgcctaaaatttctacacttctgtcattgataccgctggataacagctctcctataaagttcaggggcttaaaacaaaaatttactaattcacccggacagttcttgatagggtctctcctaactgttgcagttacatagcaactgggttggagtcatcttttctgggcttgacatccaggacagcttcttcccttgtgtgtctggtgcctcagtgctcctccaggcagcctttctctccagaagagtagcctggacttcttggcaactcaagcttccaaaagaaaaaaaagcagagactgctggttctcttatcaaacaggcctggaactggcacaatgtacttctgctgccatattcaggaggtcaaagcaatcgaaggccaatccaagttcaaaggcattggagaaaaatgagaagtgtcacttaaatgagaagtgacacatgcgtaaaagggggaaaagcattgattgtggccatttttggagataagctatcacgtttatttgtttgtttgctttctaatggtctgtcttctcccattaggttataagctctgtgagacaacaggaatcttgtccatcttgttttatggctctacttccaacacctagaataatgcctggcacatagtaggtgctcagtgaataacttaagcacttgatacatgtttggggaactaaaatgaacagaattaaacttccccagattggtcctgccagatttgctgatgccaagcatgctgatgcctcaccagatgaaagaagccctaaaatgtagggtttcgctttctctgcaaacaagaaaaacttgccctgaacacaaaatctagaaatagatttggcgtgttttctacattgaaatatttcccgtagtaccagaaattattttcccacagctttgtgctacattaaaatattgaagttgactgaaaatatctccattctttaatcttggtgtagactagaaacaatttttttgtaacaaagtaaatatgaaaacttcctaatatttgaactccccagatatccccagatatctccaaacttaaaatatcattgcaagttaagataaatttttttaaatgactaccgagaaaggtcattaaaggcttggttattaaaatgtacagatttgggttataaagccagaacttatttgtttaaatcattacatatgaccaagcacagaaaataaattacctcaaatctcctctttgctaatttttactggtaaactctataaaatgatcctatctttaaacctttttgtaaaccccttataagttagtaagtgagaatgtattcatcagaaggattttagtgatgtttgaaattaaaaaagagagatttgatttttaaaattatacttgcagactactgctaatgaaacttcttctaaccctagttttgtcttatcttcagtttttccagatttgctcaaagcaatcccagtgagcatccacgtcaatgtcattctcttctctgccatccttattgtgttaaccatggtggggacagccttcttcatgtacaatgcttttggaaaaccttttgaaactctgcatggtcccctagggctgtaccttttgagcttcatttcaggtaagtacaaaattctacctctgaagacaaatgtgcttttcaatatgtcaaaaagaccgtctacctaaatataaagttataatcttaacatatatacatggatgcacactgtagtattatacataataacaaaaagtgtggaaataccacacttgctcaacagtagggaattcaataaatactttatggacatctatatgaataactgtgatgctgacattaaattatatttttgaagatgtaatcaagaggataaacgcttgtctcaaaaagttacatgggaaaagcagtatgtaaacttatataaacattgtgaacctaatttgattatatatataaaatatagggaatatacatataaaatacatatatgtatatatgggggctatatatatatatatatgaaagagatagatagatagatagatagatagatagatagacagacagacagacaatacagactccaatctgttggtcgtggttgtctctgacccatgacactatgggggacttttatttttgctcatacttttcaatatttcttagtgttcaataatgtgctattatttatacataataataaaaataaataaatggcatcaaaaaagagtaaagggccagtgttccgcccacatatgagcagccatattcaagcctgtagacactttgtgtagcctaatgctaggtgtatctgggcaaggataaactctaaagccagaaattagttcatcaataaacatgtgctactcaatagctagggctgatggaaaagaatataaaacccagtctgtgccaaatggtgcttactatctgcaagtgggagaaggagaaagacgagaaaatgaaaaatgtgtgtataatttatatgtagctgttctgtaggagatctctgacttcaccccattctaactttgcaaaaagatccaacactttgtcagattcctgggaggcaagtaattttattgatggtttcatggagggatacagaacgataacaactcacacaaagcaaacaatgtaatgaaaatctctattcgactgtttctttttctcctgaagttgccctttggctgccagctaccaggcaccaggctcaaggtactttcttgctcttgacactactcccttctctcatacaattcaaccccaaccacaaacgtgtatagatctctctctctataaaacaaaggcctgtagttaacaggaggtcacttgcagtgtagcctctgttcattgttacttgtgcacactgcttagggtctcaccccatccacattctgctaatcacattattcacccatccaatgtagatctctccagtggagattctgctaatattttctttagatttgtcacaagtatataatacagttttaaattgtacagatgattatcctataacagaagagtctaagccttttacatctttgtatctctaacgaaagcattcagcatgaagctctgtacacagcagacaattcaatatgaatttgctgacttgaaacagcaagcctagaaaggagatgttaacttggtcacttagacagaacaggtttcagcaatcagaattcagatgacatggaactggtagaacaggcgctttgaagcaataggacatgagccagtgaggagagggatggaatatcataaacaaaggccaagggctttgcaatcagagctgaagagccaagagcacaggctcagggtgtgggcagactgaatgagaaagtgattcaatcacatgtgaaagtccagatgagaagagagagttgggattacttctgctcaccaaacatccaaaaccaaacaggtggatccgggtggtgtgctgttttactgatgaccattacacagaattttaacagaaggaatgtaaagcagtggttctcaaactggagttcccagatgagcagcgtctgcatcatctggaaacctgataaagcagcaaattctcaggccctaccccagacccactgaatcagaaacttgggggtctgggggaagatggccatctgtattttaacaatctcccttcaggagattctgaggctggctcaagtttgaactacaggtagttggttcaacaggtgttggtggactgacaaacaaaaagagactccgaggtaactccaagatggtaatgtcagaaagcagctaccacccctagggcttgggggaaccaacaaaagagtttggcattgccagaacctagaatcttgaggagaggccccagagcattgtgtctcagaccttgaggacttggcactgggacaccatgaggggtttctgggtgtgggaaagggctggaaactccccagttgctgccaccagggagaactacaagtgaagtggaaggtgtgggcctttctcccttttcttttctcgtcttctctctccccctggtgctcatgtttgacagaaaacagctgaaaaggcagaactagtttggggagtcttgacctggcatcataaagcagagaaaagcaaagctggagtgaaggtgagacacaacagctcattagcagcaacagccgtctagcgctccagcttctgaatgaaattctgaagaacagcgcacttggaagacaaattatttgacagttctgacagacgaccaaactaacagcatttgaaaagcaagatgactcagagaatacagaatttaatccaaatcccagatcctatctctgcctttggccaggcctaatgcaaggagaacctgagcacacaaatatatgcaggaatgatcaggacctgtgcctgcattctattctgtctcacccaccttcaaatttgttgtaaaaacatgggctcaataaaggtttgtgaatcagggaaggaagagaaggggagaaaggaagggaaggagccagctccagatctgtgtcttgcagaggataaaggccagtgtttttagatcacccagtgtttttctaagcccccaatacttattttgaaatatcaaaatgttcaataactaaaaaaaaaaccgttacaacaataaaacatgtttgagggtcagatggactggcagtttgtgacctctggggataaacaggtcactttggaatcacagacttcctcattccccttaaatctcatatggtacccagaagcccttggaactttggaaggtgtttattcacagttgtaatgtccatgcagaccctggctctaagacccaattgtgtaagggtaggtttgtagcccttatcccaaacattctaagtgtgagccaatgcgtcacacactcagaggccagagactgtattggggtcctttatttcacgtacgagtcacattccattaagagaccccagaagtcagctctcttccactgactggttctcttcccttgtttctcttgccaatgtgtgctgcccaggtggcagtgctcactgtcagcagagaagaaaaatgctttcctccttggacctcttttctctttttctcctccctactcacattcaggttccctaagcttccccgctccttgtgctgaagtcattctatggtcatttcttcaactgtctacttccctgctggatgggcacccaagacttggcatcctggggcatgtagaaaggggaaagggaagggaagggaaaagaagtcctcccaattgtctatctggacctttccacactgcccagagtactgctatgggcatctccttatgtctcccgatgtggtgcatgccagaccctgcaggtagaaaaggaaagaaagcaacccattggaccaggccagcaaaggcttcagtcacacagctggctcatacttatggcttcatattctgttgcctcttgaaccagacatttcttccactctcataacctccagtttagctcgtattcctcagcattctccatgtaatattgttgcatgaaacccatgcaagtcagccaatttgctctttctcatcttgtcatttataaattgatgctgagaagtctttttcccaaggtttttagtaataccttcatcatcccccatagttcattttgggcagtgattcgcttctttgactgtacattagaatcatctgaagaactttctaaaactactgatctcaggtctcacacaacactaattaaattatagtctctggtggggtagggcttgggcactgctattttaccttaagctctctggagtcattctaatttgtagccagtgctaagggttgcaatataagtgaatatatttcacgtatttgtcaaacattgactgagtgcccattatgtgccagccattataataggcactggtgatcccacagtgaatcaggcacacaatgctgtcttcacggagcttgttgtctagtgggagagtcaaacaaaagtgtatatcaataattaagtgattacagattgcaataattacaataagggtgataaacaggttgctataatatacaatagtattgcctttcaccagacatttcttaaagaggtaaatcatctatcagacaccttttaaaaatctcatctaatttcaaaagtgtacataaataattaagtgattacagtttgcaataattacaatgagggtgataaacaagttgctatgaaagagaaagatagcagagatctggctttgagatggtggtcagggaagactgctccaatagctgagttctaaagctaagaaggaactgagaaccttcacagaacgtcccaagtagaagagaaagcacactgaagactctagggaaagaggtctgcttgttgtaggaaccgaaagaaggccaatgtggctaggtgctgggtagtgaggggaaatggcacaaggaaaaaatgaggttagagagatcagttgataccagttaatgttggaccctaaacattaaccatggtaagtcttttagaattgattctaattgcaatgaaaaccttttgaaagattttaaaaagatatctgatagctgatttacctctctaagaaatgtctggtgaaagacaataccatcacattggagatggaaaaagatgaatggattctaaaaacattctgaaagtacattcaaaatgtttttcaggtagcttatgcaactaataaatagtggtggcattctgggtaagacaagggaggagcaggcttgcagtttagggcaagaaaggggtggggagaagagctcagcactaaaatcatgtgttccatttggggcacatcgagtctgagttgctatgagaccaccaagtggagatgccaagtaaatagtcagttacatgaatctggagttcagtgaagaggtctagaagaaagatgtatatttgggcattattcggatatagatattatgtaaagcaataaaattggatgagatcacctagggagagaatgcacatagataaaaactgacctaggaccacttcatgtctaaaacaccaaaagcaatgtcaacaaaagccaaaattgacaaatgggatctaattaaactaaagagcttctgcacagcaaaagaatcagagtgaacaggcaacccacaaaatggaagaaaattttcacaacctactcatctgacaaagggctaatatccagaatctacagtgaactcaaacaaatttacaagaaaaaaacaaacaaccccatcaaaaagtgggtgaaggacatgaacagacacttctcaaaagaagacatttatgcagccaaaaaacacatgaaaaaatgctcaccatcactggccatcagagaaatgcaaatcaaaaccacaatgagataccatctcacaccagttcaaatggcaatcattaaaaagtcaggaaacaacaggtgctggagaggatctggagaaataggaacacttttacactgttggtgggactataaactagttcaaccattggggaagtcattgtggcgattcctcagggatctagaactagaaataccatttgacccagccatcccattactgggtatatacccaaaggactataaatcatgctgctataaagacacatgcacatgtatgtttattgcggcactattcacaatagcaaagacttggaaccaacctaaatgtccaacaatgatagactggattaagaaaatgtggcacatatacaccatggaatactatgcagccataaaaaatgatgagttcatgtcctttgtagggacatggatgaagctggaaaccatcatcctcagcaaactatcgcaaggacaaaaaaccaaacaccgcatgttctcacccataggtgggaattgaacgatgagaacacatggacacgggaaggggaacatcacacactggggactgttgtggggtgggaagaggggggagggatagcattaggagatatacctaatgctaaatgacgagttattgggtgcagcacaccagcatggcacatgtatacatatgtacctaacctgcacattgagcacacgtaccctaaaacttaaagtataataataataaaataaaataaaataaaaaaacaaaaattgatgtaggaccaattcctgaagaacactgacagttaattttttggtttaggaggaggagaagccagcaaacgacactgagtagcaatatccaaagaaaaagaggaaaaaggaaaactgggagattatgagtgtcccagagggaatgtttcaagattaccatcagcagtgagctttgtgtaaaggtggcctcctgtaatagaggtgcgggcaggagaaggcagaatagggaaaagggggtgaaaaagcttccctcaagatttataatacagtggaagagagagacagagagagagaaagagaaagagagagagagaacttaaggaggtagaggaagagagagaaccaaaaaagagggagctgagtatagaagcaattagattcatagtttttagttgcggcagtgatatttgagtgggggccttttatatattccattctaggtgtttcccagttgatgggagagggtcttacctagatctgcatgtaaaagggagtaggccagctggcagacttgacatggatcagtggtagaacatcctagcagttctgtgaatactctctgagaatgacatgaaaggtattggttcaggccttttggaggtgataaaaaccaccaaaatgtggacttattgcaaattgtatttgttaccatttgcaatgattataattattctcttatatataggctttcttacatatagcttctcttacacatagcgtcatgagttatgccttctcttacatatagtgtctgctatgagttatgccaagcagggcaaacaaaattgctgcctttctttaaaaagaggacgctcctagtatgggcctaattaattatgataattacagctatggcatggaacataagcacattcatatacacaaagacaataaaataaagaacagttcaaaaacagaacagttacattatatatcagtttcagtatgaataataccctggactctgaaatatgtctggggcacattattctgtaattggtggtgaaaaaaaatctgcatcttatctctacgccaatccttatgaaggagctgtttttcaggagttcgagaaagagacacagggatgtccagtcatcaaagccgcagagcctgaggaagaataaaggatttgtggcaggaaaacccagtaatgaatgtattctgctagtttctcagcatagaacttagaaaagaggccacagaaggaaaagagaagtaatgttagacagctgatgttggcaatgggcaaagaatttcattctcatatgcagggcagtggctaaaggggcagtgttgtgaggaatcacattccaggtcattcatgtccagggtgtggtaggaggactgtgtttcatttattttgtacatggcccagctatgaccttgtgcaaggaaatgcttaatcattttctatcacagttgcaaagagattcttatcctactcagaatgtacgtcttctcttctgtttcatttacagtcacaacccaagtccttgctttgacctccaaagcaccacttgatgtatccacttcagaaacacacacagacagctcacctctttctatcccttaccttcctcccctcttcactcaaaccacctacttcctttgcattcactcttccttcagcctgaaataatcttcctccaaatatctaccttctcactccctcacttctctcaagatacacttaaatgttatattccctatgaggcctcccctggccatccctccccagccttcctatcccccctctctgctttattttattctccttaatatatatcacactctgataaaccattgaatgtacttatcaagttattgcctctctctccctttccattgtctccatcactgagagctctgtgaagaaaaggatttgtacctgtttcatttagtgctgtacccccagttcccacaacagcgcaacaggcactcaataaatagttgttgaataagtgaataaaacagaagtagctgcatattttctggtaacaaatgatattcttctgaaaatgtcatattttcagacatatttccgaaaataaattcaaattagataaacattgtatttttagaccatttcttctttgcattaatcatccttctcaataatataacatttgtaaaacttaggttagatatgggctcttcaactttccattacagaagataaagtgaaaaggctagacccaatggtgttattccttcatctacatctatcctttggaaacacatgaccaaattgcttgccatcacaatctcaaaatctaccctttggtattaactcacttcacttgtccctctgtccctttttagatggtagccatcggtctctggagcagtgtagagtcagaacaacttctatttggggaagaaatcattgctggtgaccttactttcaattactaactttctagtgacatttacataattttagagaaaattaacacctacacttgtaaagttgtggctttcccacacctatttatcatctctcaatattccttgaaaaggaaattatcaatttatcattctatattggcaatgaaatgcccctaatatctgtcacctataagacaattgaagatgatgtgttgaaagctttctgaaaatgctgatcattactttaaatggaattgaaattccagtttattatttccaaaaatatgatcttactgatcataggataacatttcataacatttcagagatttcttccccttcgaggagccaaacccataggacctctggactcccacagatcctggcagggagttcccactcataaaagcacaggtgccctcagagtcattcagggatgaagaagcaaccctcattggccatgtcctacgttccccatatagtaaggactggaggagaccagtgctcaattctgcagtctcagacagctgtcagaggagagtcatgaatgtgcagtgtctagcacattacaaacgtttgttaattgactgatcattcatggtgtgacagccctataactcagctatcctattcagtcagaaattaactcagtaatcaaagtcattaaaaggaagaaaaaaaaaacctacagtaccagacagatggtggggaaatcagacagatgaaaggaaaaatggctgtaggtcattgagtaagacactgggcagcaaaacctgggccttgtgcctggttatactccacattatagctccagcaaggtttggcaggatttccacagtcctggcttattctaacctttcttgggagcaggagcagtgttggtcagatagacagacacataaggaatctgtccaactggcaccgtgtgaatttgggctcttggtgtacatggataactgggaaaaagaggagagagacatgtaggactgatcctaccgtttgtgaagtcttgggcaagagtatgaatgaaaacccacttctcttcccctgcctggctccactgcacacagtaaagagcctcaagcataggtgtgtggacattgcaccatgtatccaagctctgaccatgcctcttgaaacagctattcctcagccaccctctgaccatgggaggaatgacccaggagaaatgaccacataggtcttgaaaatgggctcagggctatttacgaagtcaattccggggtcccaggagtatggactaaaatgtgagtcaggcatgccagatgggtatgttctattgacttcaaggattcctcatgctgtgggaaggaacctctccagaagagagacagagcagaaccctctaaatgtggggcacaaagcaggagcccctcttgctggattcaaagggtcatactggaagagtgtaggttgagtcttattctcacatcactcatatcacttacacacttcttttatagccttagcagccatgccacaaagagaaactcttcatgcatatcttttggtccataagtcataaatagttatccttgatcccatgtcttttttagagccatggacagagagaagcaaaaatataccaagttcacactgagttgtctcccttcatatctcttagcagtcactgaaaggttatgagactcaggctgggtttctatcctctgtccctgaaacgacaacgttgacctcgtgatcaaccctagaatccagagcaagatctcagactgtcctctctactaccagacagcacactttgttttgggggctgtgtgcttgaaatattagctatggcaaaaggctttgagtcttatgacaccccaagtaacttttactttaggaatttgaaatacagccttgctgtaatgctgtctccttaacaaagcagtacctttgaaatatttaacaacttgaaaaggaaaccgagcttgaattttcctttcaggtgctcaggaaataatgtttcacttctgtctgaaattcaccatctcctcagacaaagaaggctcttatggtaaaaggaatggcattttctccacaattttcgaataaaagataaagagaaaacagcactgcagcctttttgttaggatctaacaataaagaaataatacggttttgccaggggagagctctggttttaagctcagaatacaaaaataggctgacaaaattttacaaaggaatattctcagctaccactctgaggatggtagaaagtgaaatttcaagaaaattatattatttgattatttgatgatgattaagctgattggccagtcctatgtgaaattctaaagtagaagaaatgtgatgttgtcttttctgctcacctctcccctcattcctacccccaaatctctgcctctaccccaaacccagcctgacctttgggaaaggaatgggggctgtcacttgcaccgtagctcctcctgcctgcagtactctccccccacagtccagcctccctctgctcagctaacttttcctatagctccttctggctacttctaaggaaccttccataatgctgcccaccctctcagtaacagcccctctactatcccttgattacatgcactgtaattggttagtaattgattttatgtcctctgccaaattatactccatgagagcaaaaatcatgagtattatctttaatgtttaaatctccacaactatcccccatataagtctagagaataaatgaatgagtgaattaatgaatagaaactcaagccattatgttgccactcctaggatatttggattaactttaactgaagagtaaaaagcatttacctgtcctaaaggagacataaaattagtgggagagtatttggagaaaaaaaagacactgtaatacattcttttgtgttgcctaccctgatgtagtcaggtgtccctgatatggggtgggctgaggatttgaaataaaatacctaatttgacattgtaagtggaggaatcaggatttgaaaccaaattggtttgacctaaatcaagctattatgataaggacttgcaagaaaaaaggaatccataaaaaccatatgaatagctaccaattagtaagcatttatatgtgtcaattacaaagccaaatgcaaatcatgctttatttatattagccaccttttatagatgaagaaattgagacctgaatattaaaattgcctacttttacatagtaagtaaaggaatcagggtttgaacccaaattggtttcacctaaggtagaaaaccatcccagcaagtctcctattaactggaaccctattgtggtggcctgagatataacagtagctgtggaagcgctgtagagtcctggccatcctatgtgctcctgatctggtccctcctgccacctgcttctgctccctgtgccatccacccatctggaagtctcccagtgtccatcttcgggggagacactcaccagagtttccagcttccagccagtatggagtgcccctgtcccacagcaatctcaccgaaatcacagctacatctgttaaaattaggctaccaatgagtgatagatgagggggaaaaataataatagtgtactaaacaaaacaaatgtttatttttctcacacataaaaatctagaggttgaagtccagggctggtccagaggctccaaggatctgggatttagactccctctttcttgtttttccacagcatatggcttccatttctggggccacattggtccaaaatgtatgctggggctccagccattgcatccatatttcagccacaggaaggaggaagtggggaagaaaggacaggcccctaatacctgtatagttcaagaagactatcccgcccatacttcccaaccacccttagttgaacaatgctgtcttaattcaagacactcacatgtctagccaaaaatctgaattctgttacaaacaaggagaatagagatgtgcgccacctcaatacctcatccatagctaccttttcctttgtgcagctgtggccaagtgaaagctgaaggagctgtggtaacccttctgaagggaggctggggcctttcacaagaggctgcatgattgacatttatcctgcatggcctgtgaagtacagagaaatattttctcttgaagccacatcatagcagtggctgctttgtagcctgattccaccattatgcctttaaagtgcctagcaattcagccttcacatcatgcaaagaggaatatctcccagtctttgtaagatcagcttaattctaaccacctccttacctcccactgcactcctacacgcacacacaaatcttcttcactcagagcagaaccataacccaagccctaccacctagagactgaagaatcaggctcatgattacaaatatgcaataattttttgtgtggataatgtcaatggggatgatggtaagagaattccttggtttacacattgaccctcttccctgtcccttacaatcaggaaatatttgtcccaacaccttgtttcttctgttgcaggctcctgtggctgtcttgtcatgatattgtttgcctctgaagtgaaaatccatcacctctcagaaaaaattgcaaattataaagaagggacttatgtctacaaaacgcaaagtgaaaaatataccacctcattctgggtcattttcttttgcttttttgttcattttctgaatgggctcctaatacgacttgctggatttcagttcccttttgcaaaatctaaagacgcagaaacaactaatgtagctgcagatctaatgtactgaaaggcaaacctttctataattttacaagggagtagacttgctttggtcacttttagatgtggttaattttgcatatccttttagtctgcatatattaaagcatcaggacccttcgtgacaatgtttacaaattacgtactaaggatacaggctggaaagtaagggaagcagaaggaaggctttgaaaagttgttttatctggtgggaaattgcttgacccaggtagtcaaaggcagttgactagaatcgacaaattgttactccatatatatatatgtgtgtgtgtgtgtgtgtgtgtgtgtgtaagatgtcttcctatcaaaaagatatcaaaggcacatggaatatattttaataaaaacaaataatatctctaatatatccacacatttgttgccagatttcagaaaactgagctgcaatcgctttcctaaaacagtagtgtattaaatgaacatctataaaatgtatcaacacacattttaaaaaatttgtttaaagtatactcttaggccaggcgtggtgactcacacctgtaattccagcacttcaggaggccaaggtgggaagatcatttgagttcaggagttcgagttacagcctgggcaataaagtgagaccctgtcactaacaaaattaaaaaataaaataaatataaaatataggctttaaaaaagcatagtcttattaaccatgtctgttggtcaaaatctgcaaactctaaaagaagaaaagaagaaaaaaccaagcttagggtatttttcctcccgtgcctgagtcccaattacattcacgacagtactttcaatgaacataattgttaggaccactgaggaatcatgaaaaatgatctctgcttagtacatttgatgcaaaatgacttattaggggctgtttttctagctatagtgtctcgagtactaatatgcaattatgaaaattatattaaatctgggattatgacggtatcactgtatcatcttggtcttgttctggctgtcaccaagcatgacccaggtcaactttttttttcccctgaattacccatcaaattgatctgcagctgactaaaggccacagctgagcctggaactgacccttccttcatcctcaacctgctgtcctccagaaagcaccaaggaaaaagcagagaatgacagcaaacagatcactaggcctctgaccacaggtgctgagtactcagcagccctcatataataggtttgaaagtactccttaaaataaaacactgtttccctttggaactatttacaaggatgaaacaaccgtatacctgagaaataacttgctctggtgtcaattcgctattcgccagcagacatcagaacacaccgagtttccagatgctggtttttccccttaaatcaggaaatacacctggacaatttctagaagactacaattcagtctagccacaaaggggattttttttttttggtaacaggctagagcccggttctgtaagtctttagctgaaatggtccagtacaaaagcactggaaatgagtgggctaggaggacaaggaccgtctcctgcgtgaggagttggttggaggtccccaaggccaggtaccccctgcactcttattggattcctctctgtcttcttggagttttgaaaaactccttcgaacaccaggcttttttctttagaaaacaagtctccaatcgttctctgttccgtagaaagagaaagaaaacctggagcagctgctgaaaaatctaatgaggaactaagaggcaaacccacca

SEQ ID NO: 11 - DNA, 169456 bp, Homo sapiens
  source 1..169456: mol_type = genomic DNA; note = CNGB3_gene
agagaagatgtttaaatcgctgacaaaagtcaacaaggtgaagcctataggagagaacaatgagaatgaacaaagttctcgtcggaatgaagaaggctctcacccaagtaatcagtctcagcaaaccacagcacaggtatgtcctctacattcctatgcaagccttgattttcatcatttcttatctggtaatagcatttaatcactgctacgatatatgattgtttagtagttttacctggcaccatctggtacatgtactgtgtcgggcttatcttcattaatttatatattctgtatgtatttgttcataaaaagaataataaatgtttaggagactatactaggatttggaaaagccaagtaagacttctcattgctgattttcacttctaccatcatccaaaatgaaaccatttctcaaatattaaattggttacttgattgagtttcaacaaagaacatcaagtatcctggtcttcataaaccacatgttaacaataaatctctagagcaataggaaacctattggctctcaattgagagcgattttaccactcaagggacatttggcaaatctggggacactttcagttgtcatagctccggggtggggatgttactggcatccagtgggtaaagtctgcagatgctgctcaacatcctatcatgtacaggacagccctccacaacgtagaattatacactacaaaattttaatactgccaaggtggaggaactttaaacaagccttttcacaagttctaaatatatttttctgcaaaatgtatatgataatttctgctttgttatgagaactagagacagtaatatataaagcacatggtaggtactttacaagtggctattattattattaataagaatttgtgtttctgtgacaggtttaagtcctaagtgatcattacaagagcaatatttacttagaactatccacagaataattttcgtgaattactcactagaattatctaaaagagctacagaagatttttagagcagtagttattttgccatctgaaacagctggatgagagatgacaagtacaagcaggagtgctcctcagggactaggggagcatagtccaatggttcgggtttaaatgagcctagaggatagacaacactgagactatttaacatgggccgtggaaaatctgccttccttttctgattaatgttgactgctttgcagtagagaggagatgaggaggactgtgttagtattgcttcgagagagtgcccttgacttctttctaattcttatgtcaaaataaataatcccacactaagttatctatatgtttaagaactcatacaatgtcacaaatattgagctggtactttccttcagctagtcttgctgtgttttgctctgggaaagtcactacatccatctttaacccttgcctactgtgattattttccaagggagcacataaaaaccgttaatagctaatatattattctcttggagaacattgtaactaacagcaattactatttgccaagcaaggtgctaagcccttttctagggctactgtatttaatcctcacaacagtcacaggtcctattacaatttgctccttacacatagctagcaaatggcagagcctggattggaaccaagtcctatctgaattcagcacctgagagctaaatcactaggctatactgctcaaaacaggagggatattagttgagtcaaccctttaagatactttgcctgcaggataaacggaaattagagagaaggcgaaaaaagaagagaaacttcttaaagagttatctttcctttcaaaacaggaatattggagaagtacttagattaggcacaggtagagcaccccttaggtatatcccatgccattccaacagccataatttgtggatattaatcgcgaagtctactggcatcacattagattttttttttttgttttttttgagacagagtctcattctgtcgcccaggctggagtgcagtggtgcaatcttgactcgctgcaacctctgtgtcctgggttcaaacgattctcctgcctcagcctcccgagtagctgggattacaggcacatgccaccacacccagctcatttttttgtatttttagtagagacggggtttcaccatgttggccaggctggtctcaaactctcggcctcaggtgttccgcccaccttgtccttgcaaagtgttgggattacacgcatgagccactgtgctcagccacattatatcttaaaagtcatatttgggcaattatttgcatctgttctttccaagaacatgtgggtatgggaaaaaatagtttatctccaatttcaaatatgctaaatgttaaaaatgacagaaagttaaaatcctgttttctttcacggaattcgacctttcaaaatggcatttaaacaataagcctctgaactatgaataaatgattagagtcttataagcaaatatctaggaataaatatatcaatgtatgttgtgttttttaaagagtcatttaaagagctcatttacacaccaaaatgtcatgggtaattctcacctatcaataaacaataatttaagaactgcaaatcagtctaatccaaactctctcttaccccagaagaagacactcttcacataaatctacatttgtatacacataaagactatgatataaatatttatgaataacatcataacgatgcaaaaggacttgattgaagtcagaaggctttttcactgtttataaatagtcctggacttatacctttctagctacgttcatataaactagccactcaatcaatttcatattcaataatataataatattaataataatagctgccttgcctaatgtatatggttattgtgaggcttaagtgaaaatcagccaattaatttattttttagtttaaaatgcttctatgaaacacaaggcttataaataatgtcaaaactctatagcaggcacacaagactctcagtgtccttctggtccctgcctactctcaagcctcatctactcaccctttgtcccatccaaccactcctactgtagtctctccccacctatgtacagtcacgcctttggcttttgctaaacctgcatcatctgcctggaatattttctaagtcctctccatgtggaaaacaaaaatcttatctttataaagtcaagagtcactttctttggaatagtttcctttctttcccttctactccagtagaattgaccacttcctgtttatgccccatcctaatcctctacagacattgattcgtcacctacattttcttgcacttaacatttttgtgtgtttgtttccccttctagactgtgcatagcttgggagtcaatctttatgttctaacctcatatcttgtttcactctgcccctgtaggaacatcctgaggcacacactggccatgtctagtgggacataacggcatttcaaaggaaagcttagatgatcagacaaatgatgaggcagaagcacatgaaatcatggagagaagaaagggagctttgtgtgaatgggaccaaactgccttctctccactattttaagttctaccactaaagacctagactaatgctaggcctatggcaagtaaagaccacaattgaaggaatgtgaacaagagaaacacagaatccacactgaaaaaaccagagggcagctgtggaggctgaggttgattattcaatagtaggccaagaatgcccattttaaatgcaagaatcatttttagtacatcataaacagtcaattttaatgatctgattgacaattaagtggaaaatggtgttatgttttacattcaacttcatttttatgtaaattcatcacatacaatctctatgttttttctcaaaggaagaaaacaaaggtgaagagaaatctctcaaaaccaagtcaactccagtcacgtctgaagagccacacaccaacatacaaggtcagaatgcagtctgaaaaaaaaaaaaaaaaaactaaaaagtgaaatacatatgtatctgaaatgtgctgtctgatgaaatatttgtccttgactaggtgaattatctagggtcatactgaggttatttgaagatctgaatatttcaaaaactttatatcctcattcagtaactcatttgtccatgcaatagatgcattttcatcacctgacatgtgccaggcactgttccatgggctggaggtgcagtaatgagcaacatgggcagagtctgaggttacatagagcttgtagtctaaagaaacacatcatagataagtaagcatattgtgaacgatgcaatttcagacattgataagcaatatgaagacattaacatgaatgtggattgaacacatttaaaggtttagcactcacacctctgctccctcctgctaaactctctccattataaggctcatttactcctaaggctaccacactcgattctacagggatgattctaaatccgtatcaggtcaatttcttttttaagactcaatatttttcaactcatcactagatgtacacgacggtatattctactgcattacaaagaaagcatgtctaaaactaaattccttatcctctcctacaaatacgctccctctcctgatttacttctacccctggtactatcattctttcagcctcccaagctcaaaaccttactcaggttttattcctttaaccaggatgtcctgtaaagtaaattagtcaccaaatctcctttcataaggaccctgaaacccacttcccttttttttttttttttgagacggagtctcgctctgtcgcccaggctggagtgcagtgacgtaatctcggctcactgcaagctccacctcccgggttcaggccattctcctgcctctcaggctcccaggtagctgggactacaggtgcacaccaccaagcctggctaattttttgtatttttagtagagacggggtttcactgtgttagccaggatggtctcgatctcctgacctcgtgatcctcccgccttggcctcccaaagtgctgggattacaggcgtgagccaccgcgcccggcccacttcctttctttccgatctcagcaataccatcctggctcgggcccttattagtagcttatgtctgcactacccccaggccaagtggttgcttttgtttagaactctatgtcacccatctctccccttgttacccagcccaaacactgttagcagattattttccattaaccaccactttgatctcaacctttgctcaagaagcttaagtgcttgcatattgcctgcaggacaaaatctaatttcctccacctgactttgtagaacttaatgtgatctattcccagaccccctttctagaccttctctcctacttctccccagtaggaacactaccccctaaccaaataaatacaaaaatgaaagggaaatcactagaacagaatatgctttgttaaataataaaaataaaattattgccataaaactagcacaaatgttttgcttttcatctgttagacaaagtccgtgtatgataattgttaatgacttcctatttgcactaaaacaaatatttgaactgaggcacaattgagcttttactagcccaaatgtctcatcttcaaggaacaaaaataagaaatgcacaaaaattacaagaagattataaatttaaaaacaaatcacaagaaatgtttcaaatacacaaattgctgtcaaggaatatccctgcagtcgaagtactgaggccactatcccaagcaaactaactcaggaacagaaaaccaaataccgcatgttctcacttgtgggagctaaacattaagtacacatataaagatgggaacaacagacaccaggatctacttgagggtggaggatgggagaagggtgaggctagaaaaactacctataggtatgcttattcccttgatgatgaaataatctgtataccaaacccccgtgacacaaaatttacccatataataaacctgcacatgtactcctgaacctaaaaggttttttacgtttttaatttttaaataattccaaattccagtaccatcttactttaatttggaaatgctacattaaacctgttgtgtaataaagaaaaatttaaaaaaaggaccgctctgaacaaatggccccactctcatacttacttgtttctatttaggagaaaaggaaagaacctatatgaagaaaataattgaattttacagacatatgtagaataaacttaaataactggagggaaatatgtgtccacttgggaggataatattataaagatgttgatttttttcctgaattaatttatatttatactttttacaatctactctctacctacttacaagaataaaatttgtttaaaaaggggaagaaaattcactttagttttcttgactttatttacttattttgaaaaacacctctgttttttcactatgcagattagaatgtagaggatacttgttcttacacagaccaggtgtttttgccactatctttcatctgtacttttatctctgccacaaagatggaaaacagtatcttccaaatagaaaatcagcattgacttatccgaggagaaagggggaaaaaaaagcaagtgttctacaatatatttttcaacgtgaatgcaatataatacttcctaactcatgactaaagctagactgttcaaccgctagattatgtgattttaaatatttaggataacgtgtcactgaaagaggaaaacacttaataatcctaaaactctatctgatccaaactcacatatataaaacttccataaatagtaagaatcataaaccaagaggacattgtaaaaaatgtggtcttgccttttttttttatcagtaattgaagaccattattccatcttcaaatttgtttaaaaggagaagacccttttgtagactatacaacaatcttgaatgcatacaccaaaatgtgattaacaaatggaagtaccgaggaagagagaaacattctgataattcaaactacaattctttttttctgagttactttgtaatagtaatgatttaaatctacagttctttgcacagaaaaatacaaccttaattagcataaaaccaaggattacacctttgaaaagacaagtttattcttatctttgtcatacttttttcaaagtgtatttgtaagcttaaatttttcatagctggtaataaaaactcttttgtggaagtttcatttaacagaggagctatttgagtagaaggaaaaagtagtttcatttaaatctgcagacttggcatgtctccaaagactttaataggaataacagttatatttaagatattttgtcttgaaaaagcaaaattattagtgtttaaagatagcctctgatatgtgcttggtatttttgtgttcacttcaaaacatgcaggtgcaatgtcataaaatctgcagatgttgatttctgattatagaactcttatcttctgcagaacatggtttcatttatatctgccatggaaatgaagaatgcaacatattttggattcaaataaagataacttgctaaggtcctcttttgattataatcatcttccttaggcatctatttcatttatattatgttaaatgcttctttaaataaatgtcttggtaccagtagaggatatgtaagtaatttacctagtggtttacgatacttttaagtgaccctatttgtgtagaaatgggtcaaagttgaattcccattgctagtatggtgtggtaagccaattaatggctatccaaagctgtccacaccataatctctaaaatctattaatttgttagcttacattgaagaaaattgctaatgttactaaggatcttgcaataggaagattatcccagattattcaggtaaccccaatgtaatcaaggggtccttataagagttgaagcaggagagtcaaaggcaagagctgggacaatgaaagcagagttggattgatgctctctggaggtggaggaagggaccaggacccaaggagtgctgtgacctctagaagctggaaaagaaagaaaggattctctcctggagcttccaggaggaacacagcccgtcagacacgttttagacttctgactttcagaactgtaagacaactgactgtgttgctttaagccattaagtttatggtgatagattacagcagcaatggaaaactataatacatacagctttaagagaattccaacttgaaatacaaaatacaaccatttttctcctggctaacacggtgaaaccccgtctctactaaaaatacaaaaaattagccaggcatggtggtggatgcctgtagtcccagctactcgggaggctgaggcaggagaatggcgtgaaccctggaagcggagcttgcagggagccgagattgcgccactgcactccagcctgggcaacacagcaagactctgtctcaaaaaaaaaaaaaaaaggcaaccattttaaaaatgaaattgagttttcctacaatcacgttgaattcatagtaaaggcagtataccatacaaaaaaaaaaaaaaaaaaaaaaaaaaaaccaccggcatttgagaatttgacatgcccgaattcaaatcacaactctgctactttctaactctttagttgaggcatttaacatctttgagtgtcattttgctcatgtataaaataaggacaacactgttatcagtgttgggttgtgagtgagaattaaattagttaatatatgtaaagcatttagcattgaggttggtaaatcccaaccctgatacaagccagatagcataaatgaggagcattcatgccctgtctgaagaggtcagaggctactcagctctgctagtcactgtcacatggggatgaaggtcaagttctgccaggtgttacaccttgtcaagacaaactacaaacacaaatgttaatttgaaagatctcaatttttaaatgttgacttttttaatgtttaaatattccctttcttaaatcactgggaacacataactgaattcttaccaaatttagtccacaagaccattctgtgacctctaaccaaccacgtggtagacatgtaatgttgtctgcatttgtaaacagtgaaatccctagacaaaattctgaatctggcaatgcgtttagtgatcctgttacttttccattcctctttactcataatctccatcccagtctttgttttgtaaacagactacaagtagggtggcctccctggaactgcttgccaaatagctttccacagccaagacccctaggttccaagtctagcacaattccagatctacagaggtgcccccagccttgcccaggtccctatcatctctccaaactgacatagcctgcatttcagccaactctcactttgggcgtaatctaaagctaaaaactgctctggagctaaaactactctaaaaataataataaagctggccaggcacggtggttcatgcctgtaatcccagtgctttgggagcccaagacaggaggatttcctgagaccagcctgggcaacatagcgagacctgacctctatccccccaaatttttttaattagctgagcatagtagcacccgcctgtagttccagctactcaggagaatgaggtgggaagattacttgagcccaggagtttgtggttacagtgagctatggtcatgccactgcactccagcctgcatgactgaaagaaaccctgtctcttaaaccataaataaattaaaatataaaataaagtccagtttttcagaaaaggtagtggatgtttaaataggaaaccactcttcagtccttggcagtaacaattagcatatacaatttaatgtgtcctatgtggaaaagaaaaataactaggcaatctactgaaatttagtttacaaaaagcagtaaagactttaccgtgtacgaccaaccagtttgattgacatgcataggaagtactactatggctaattttagttctgtagtccactccctgtaactttcagtcctattcaccagccaaaggataaggtgggaagagagaccctcctacaaaatgtatataactttttatcaaaactactcaagcagatttctcaaagaacttaaaacagaactaccattctgcaccagcaatcccattactgggtatatatccaaaagaaaataaattgttctacccaaaagacacatgcattcttgtatgttcatcactgtgatattcacaatagcaaagacatgaaatcaacctgagtgcccatcaacagtggattggataaagaaaaggtggcacatatatgccatggaataccacacacccataaaaaagaatgaaatcatgtcctttgcagcaacatggatgaagatggaggccattatcttaaacaaattgacccaaaaatagaaagccaaataccacatgttctcacttataagtgtaagctaaacactgggtactcatggacataaagatgggaacaatagattctgcaggctactagagggaggaaggtggggggaagagttgaaaaactaactatttcaccttagaggagatataaaaaataaaataataacaaaaaaaaagaaaagttaaatgttgggtactctgctcactgtgtgacaggatcattcacatcccaaacctcagcatcatgcagtatacccatgtaacaaacacacacatgcatcccctgaatctaaaataaaaactgaaattttaaaaaagactcaagcatatttatttccttcatccaaatagaaatagtcttatgtagccaacaatcagaagtattcttttaaaatgatacctgataggatgataaacaaaagaattgagaaatgaataaagttggtatgacatttctgaaaatttagtctagaaaaaagataaatattacatgctttctagtttgagatgatgaagaaaattcctaattgtgctggtttggcaagagacagagacataatcaggacaccttcagtggcaggggctcgttgtaagaaaacttatggataactggagctgaaaagccattcaggggaggctttcagactgagacagcctaggagctaattactttttctccttttccctcagtgaatatggcttcatttctcatgagcgctgtgttttctctgcatatctactctggactgctctcatttccatttactcatttttcagtccaaattccaaagggagtagtctgactgacttagataacaaccgttttccccattgagcagagcccttcagaccaccattgaggttgccagccagctgtggacaggccaccctcttgagattaggtgcccagcatgtgtgtgatgggtaaccattcctgcatgtaatacagcagaaagctccctcgcttaaaagagcgaagtttggcatggaaagcataccctgttttaaatattgaatagagaacagattctgaccgataaaattactgtcattacgtgtttcataagctaaaaatttaagagaccctaaccaatgtggataggatggattcttttcctttaaaaggccttttatgttgtagtttgcatgatttaaatatatttacataattcaattaaactctgtgcttttaggcttctttctgccaaagaatatagctgacttatggaaaattgcattacgattttctggttcctgggctctgttaagtaaatggaagtttttgtatcatgccccacatacgtcagtgctatgaagacctgaaagagttaatatacattttctttttttaagcaatttattccagtctggctcatggaacactttgtgtttatattgcatttttctcaaatggagtctttatctaatcctcacagaaatccccaggacaaaagtatttttcattttatggatgaggaaactgttacagaaaagagacttatccagagtcacctagagaattagttatgtagggattacaggtctctgttcagtacccagcactggtaactcatcacactccttaatacctatatataaaatgtgttttctagatgaattaatctcagttttaaaaaagtccctgaaacctagcatgacattgagagaggactggattcctccatcctgacacagtaacaaaactaacttagatggatccacgttctttttcttttggcgatttgcacatttctttacttgtgatgatgtatcctaaagtcaaaaatcttcctaaatacaaagatcccttcaggacattataggactttaaggctgtctagaggacaccttagttttgaccccatgcaaagatcctgtcctccctcagcacaggctcccttagcacaggcttcttagattggctggaggctcctgagtaccaccagccaacagagccttcactacctcacaaagcagtgcattttgtggttagacaagttgctagaatgtttgagggttttgcgtgtttgttttgttaattcattggtaagtctttcttctgccttctagactacatgaaataaatctattttcttttctatgtaatagcatttctatgaatttgaaataactattaggtcactagttaatcttaaatactttactaaaagagcctaaattcctcacaccatttctcatatgagatggtttccagaactctcatcccttctgagtccttctctggatttcttacagatcacatgtttttaatataaagtatgtcatttttctgttcttctgaatgccattttaaaaccctctttcagaatccattttatgtgcactgctgtaatgttgtcaacttcctccatgttgtttgacaatctacaaagatacaataaaatttcaagtgtgattaaagtattatagttaaaattattctaagtacactagataatccagcaactctgaaattagccacaagctgagtcaaaaatacaacctcaggtgccagaaaataatcattaatcatatacttcttaaaactgttagtccttaactccaaatgttcatttagatggaaaataatagtattgtttatgcatctaattgaagtacccagacttagtctttattaatgcatctaacatccagttactcaggtactggtggctcctaataaaaggagatttatttttgagacagaacccacatgtctttgatgtcctaagacctagaaatttgaccaaagtagtaccatcccccacaccaaagattctaaccagtgaaggcattgtcaagtcttgtgcttttcatatccatctaaaacaagccaactgagtgtctttttaatttacaaccttattcccatattaggttctttctttgaatccctcctgtccagcatttatgtaatgtcactgataaaatgtggaaggttaatggatttccacatcacttatttcatcacctgaagagagaagcagatgtttcacacctgctcgtgtctccatgttgtgctgctacaaggggccaaggagattggaagtatattacacaggctcagtgtgagacgctgccaggctcaggatggaatcagcctggtgtgtggagagcaaactctacttattttttgcacattcagtaaaggcaaccacgtcagaatactttgattccagatttcactatctgccacaggtacacattccagggaagaatttgaccaagtgtactgatgagctctggcaattgctatacaatgtgcaaagagcaccattggcagaaagacttacactattcatttgggcagctatgaaatctggaatcctgctgtccatgtgtgaagctgggaagaatcacaatgtgccgttgacaacatttcacccagatgccagagcaagatttgccttgtattttagatttctctttcatgatgaggatgatgcaaacactctgaccatctgtttccacaaacaaataacatgttgcatggataaaaagacacccacactgaactatagttgacaggcattcttttgttttgagtcctcatgggttttttaagttgttgttctgctttgaagccaagaataggaaataactggtttctaatcttcatcaataagctattaatgaggatttattttgtaattaaatgtttatccacaaatcaaattaggctgaaattaatttataaatatcccaggcttgtcaaaatagaggcaggatcaatttagaaaggcttggtaatagctagagaagatctggtaagttgctaagatctacctagaattaattttatccaaatgttatggtgataaacaaaaattcttattaggaatggacaaaaagaactattgcagaacagttggtcatttaattggtactagcagaaaagttaatactgaaaatgcaatacatatgctgtagcttgaatgagagatggaggaggtatatgatgcagcttatatccatgtggctttataagaaatagcccaccaggcacagtggctcacaccaataatcccagcactttgacaggcgcattgcttgagcccaggagtttgaaaccagcctgcacaacatggcaaaaccccatctcgacaaaaaatacaaaaattaactgggtgtggtggctcatgcctgtagttccagcgatccgtgaggctgaggtgggagaatcacttgagcccaggaggtcaaggctgcaatgagctgtgatcgtaccaccgcactccagcctgggtgacagagtgagaccatgtctcaaaacaaaaacccatagccaataaaagcctttaagaaatgttttacagtacagattctatttgttttacattcaggatttttttctgatttttactcatatttcatattctttatcagtcctaattttcttttagggtaagtactcctagaaacatatgtgaacacaatgatccataacatgtttcttggtccggactcctttgagaagcccatgataactccagatcccctccatgtaataaaaggtatatacaacatacggcttcaaggatttcaaatgaaaaatgcactagacatccatggccagcaattaagaattttgcttctaaatatcatacagtaattgtccaagtgtttgtggatacaaaaaaggattaggctgccactttcacagacagcaatacaaaatggaaatttgtcagagatctgatctatatgatttttgttttgattgggtaaagagaaatggaaaaatatgacttgacccaaacacataaggaaaacagatccttctctctttttttatcaaaagcttgttagtacaaaatgacatattgaaagtgcaattttttttactctgaaatctgttggatactgataaactcattagtgtaccacatgtgcctgtacagaagggtccctatcctacaactttcaatatttcacctaaacataatctttatacgcaggcttcaaggatgtgattatattgagacctttgtatcccaaggaaattggagaattgttttttctttccatttaaacataacaaaaacatagctagtactgtgttttctctcttctagccaaaatactataattccaaaataaaagtagataggagatgcgtaatgaataaaagcgtcttgggaaatccgagaatttaggctttcttagtcttaaacttttaaaaattttaaggagtgactcaattttttgatttcctttattcctgaaacttgttcctgaaaagtttagtaccttgaaagatttttagatggatcttagaaatgttcatattaaaggactggtatggtgatcatcccctgatttatcacttttgtaaatccaaattttcaatactgggtttgcttatatcttcaaactatatgtattacaagaaaataaaatgatgatttgggcctccattttaatatcttaagcacaagacatccaattaaaaatgttagaagctgtggaaaatgaataactattaaattgtattcgttcttatttttcttttccgcttctacattttcttttaatattaagtaatttgctttcattaaaatcttctctataatccaaatatttaccagtaagttgtttattctctgggtaaattacaatttaaactatattaattagaaattgtatctgtaggcttgacgggaagaaattaatttctgtattgaaaataaagctagtacatattagtttgtatcatttcgtcagaaaatatttcacaacttaaagatggtcaagctaaaaacaaaaatttgatttcataaaaatgtagaatgcaagtgctaaataatgtcaatcacattttttcctattttacttttctgaattttatgatgtatcaatttcagcccaaaattatgaatactttagcaaaactggaaatgccttctgaataataaattcttattctcagctttgtcaatatcaaaaagaaatatatcttatgaacttttattacataatacaccaacttcaattacaatcatgtgctgcataaagatattttagtcaataaaagactgcataaaagagggtagtctcataagattataataacatatttcaaactgtatcttttctatgtttacatacacagactgaccattgtgttagaatggcttacagtatttattacagtaacatgctgcacaggtttgtagcctaggatccatagagtataccgtatagccttggtgtgtggtaggctataacatcaggatttgtatgatataagtacactctatgatgtttgcacaacgactaagtcacctaacaatgcatttttcagaatatatctctgtcattaaatagcacacgactgtattttttcattggcctgaaggtgtctaccagttaattcttcctgcataaagtcctactttgtttagcagaagtcccaggggaggtgttcttgagaagactattctaaaaaacaagcagcatctttgtagctcatgttgccaaatatagctgggtcaagagtgttgtacattcttctatctatgtgaatttttttttcatagacaaactctccaagaaaaattcctctggagatctgaccacaaaccctgaccctcaaaatgcagcagaaccaactggaacagtgccagagcagaaggaaatggaccccgggaaagaaggtccaaacaggtgagcatttaataaaacacacaacatattttagagatattgctcagcctgccctaaagagctcaaatatccactctcccctttagctgaatataagggcagaaaaaattcaatagtcacataacacaaaaaaactgtgtcagaactaaaaggttggttctgtccagttcatcgtacctcactggcccagcatggccactaaccaatatccctaggcagccatttggctataggccaaatcacaacaaaaatattgctgttacatgtatgagtcattgtatcattatggaaacagcctatatatttactaggcatgaattttaaaaagaaatgatgaaaattttccaagctcacaaataaacagctattccaattctgtgaatattttattgtttcaaaagattaattattatttccttttatccactaaagaaagtgtgacatgctaaccaggaataattacagaactggaacatctttatgccactgaaggaacacagctttataagtacttcccgtaagagtattggaaatactgcaaaagagataacaatttaaatgtgaaccagtaaatctgcaataaatcccaacaaggaggtccttcattttgcctcttcttggcatggtattatgtacctgccgatccagttaaaatggcttaactataattgatataattgcaatatgtttatgaaacaataaaagcatattcttatttaatagacaaaaagagttgtcacttataaagaagttaaaagtacctattcgtccatcccactccaccctaccccgccttctctctcagcagcacctctactgtgttaaaccatctgctgttagtagaagtcatcgtgattatctaggacccagggaattgctgaatgaacaattggcatcagaaacagagaatgccttttcgataaacacaaatttgactatatgaaaataaacacaagctcactctaccacatacacgcacacacatacacacgtgtgcacataaacacaatgttatttgacaaaaataaaagttgacatattattttggcagagagatgtttaaactctgaggtaaggactgtaatctaacaagagaacaactaattatttatattttatctataactgttgttgtttacagaattattttcagtcctattagtggatcatcattatcttcactcaacagataagcaaccaagatactgaaaggttaattcatttgcctgtagtaatagggtcagctctcctaatattagactacaaaagatttgaattcccaaagagaacttttacttcctcacaccaatacactcccagccttctaaactaatctccctttctagcattaattttaatatgtttattttttacaataacccacggcaattgatagattttcaaaggactgaagttgaagccataactaacattttgggggataaattctttttaatccgtattcattcctagtatttcttacactcttctgaaatgtggaagtggaaacctttcaattacccaggggtcaatcagcatagctcaaaaacaaaaaacttcttgacatgacctctcaggccctgcctggtctgtctctcacctgtttttactttgtcctctcccaacacacaactttcccacctctctgctccagtcacacctgttctatttcagtctcttgtatttgtcatgttccctcctgccgcaggcttttgcacatactacttcctctgcttgttctattctttcctccccttatcacctaattaacttctattcattcttcagataacaatatgaccaatacttcctttgtaaggctttccctgacattcctaactaggctatgtgcccctattataagatctctttcacagcatttattgctgatgcattttatatgattatctgcctgaaaaatccatcagtctcaatctctaaattgtgtgcttcatgatggcaggggccatgcctgtttttgttgatgattagtatccccagtacctacatcaatgtctggcacatggtaaatattcaataaatatttaacaaatgaattgattgatccaaacatattggatttgcttgaactgctagattttcaaaactatacagcttctccaggaggagagcaagacacaagtgactctccaagtcttcccattccttcctgctcagaattcttgataaaagcaagaataatcagtagcatattgcaaagataatgaggaaaaaacatgaggctgtaaagctctcaaatccttacttctcttctaacatggcttttcatcagtatcactatcctgagatggcaaaactgttaaatccagaagactttttttaagtgttattttagtttcatgggtacatatgcaggttgattctatagataaatttcatgttgcaagggtttgatgtacatattatttcatcagccaggtaataagcacagtacacaataggtagttttttgaccctcagcctcctccctccggtcatcctcaagtaggctctgatgtctattgttttcttcaacgtgtccttgtgtgctcaatgtttagctaccattgtaagtgagaacatgtggtgtctggttttctgtacctgtgttagttcacttaggataatggcctcaagctccatctgtgttgctgcaaaggacatgattttgtcagaacactttttaatgtcttcctggctacaacatagatagcaaagtggtttgagaagtattaacaaactaagtagacccaagttagcttaaagttcttgctttgttattagatggttgttcacatgttttctcaggattgggtgaaaaccagctgcactgaaggaacaacttgaaaggggcattagaagctccagtatcagctttgactaaaattaacgggaatctttaagttcaataccatgtagaactgaccaaagctttctgttccaatctcatgggtgacaacagttaccatatctagaatcctagggacagagtttttatacattataagaaaatatcaatgataaaataattattgaaattattacttcacaatgcttttgatgagtaaaaggtcacctttatattttcagttgttaaatatcagcatcttcaaccttgggcaaggtcaggttttaaaaagctctttctcctagaaaaaaattaagtatttgattgattgcaggaactaaatatagatgctgtgtgagtgaccagctgtcacctcaattttttaaatttggaaaatttaaaagaagttttcttattgtaagtgcaattactttatcttctcacgtaagccttgagctgaatagggattattatgtctggactgatcaataggtactggggagaatgcatagtgtggattttgctgtctgtgtgtaagaagtacagtttgatattattgattacacccttagtttctgctctgtttggaagatgggcagaagtgaacaccaagaggaatagagacatagagattaccatctgtatcagttagggttctccacagaaatagaaccaacaggatatatgcatatatagggaaataaatttattataaggaattgactcatgcgattatggaggctgagagtcccaagatctgcagtcagtaagctagagacccgggaaagccaatgatatagttccagtacacgtctgaaagcctgagaaccagaagagccaatgttataagttccagtccaaaaagccagcaaacttgagacccaaaaggaaacaatgtttcagtttgagtctgaagtcagaaaaagaccaatgtccaagcttaaacaatcaggcaggagtgccctctttctctcaggagagtcagcttctttgctctatgtaggctttcaactgactgaatgaggtttacccacattagggaaaccattctgctttgctcagtctactgattcaaatgttaatatcatccaaaatatcctcaaagacacaaccagaataatgtttggccaaatatctgggcacgttatggctcagtcaagttgacacataacattaatcatcacgccatctccattatgtacataaaggaattgaaactgtataggtcccactcttcacctccaaaagcaaacaattcattatcttgtcaaatgaaacacttaccttctgaaagacacagggttcacccctgtgaagtcccactgatgccatttgtccattaccaagaaaaacagcttatttctggcactttatctcagtccagccttattttttaatataaaaatatattttgatggacactaatgaatagcaagcaaaagaagatgtgttttgcctggaaatgtcaaatagctatgtctgaaaaaggagacagagttgaatggctgataggttaagtggttaaatgatgaacaagcagcgagtgagtgaaatgttcagtgcctatgactagggtgtgctgcaagactgacttttacactatagtatatggcttttcatcaccattgttactcataatactgagaaggaaggttatttctatgaatagtcttctttgttcataatagcaatcagtctctatttgggtggttttaaaataggcaatcatttcacagcaggaacaatgagagcagaatagaattcagaatcttatcaccactcataaacactgacgtttattgtctagtagctagaaaaagcaagaatcactgcagtaaagatgcttaaaaatccatatgtgacttcatagttgaaatagaaaaggaatgtcagctatcaagtttacaaaaataaaatgcaatttatacttcaataatttataagcattttttttaaaaaagggaaaccagctacacacttgccaattttgtgggatgcataataaaaataatgcactattacttttagccccatattgaaattttcctctatggtaagcaatacttttataattaaacattgcaaacaatttaaacaacagatcatcaaatctgtttttatttattttttatttcaataggtttttggggaacaggtggtgtttggttacatgagtaagtcctttactgatgatttctgagatcatcctgagcagagaacactgtacccaatgtgtaaacttttatccttcacccccttcccactctttccccatagtccccagagtccattgtatcattcttatgcttctgcataagaatacttagctcctacttataagtgagaatgtacaatgtttggtttttcattcctgagttacttcacttagaataagagtctccaattctggccaggtgcggtggctcatgcctgtaatcccagtggagactgacctttgggaggccaaggtgggtggatcacttgaggtcagcaatgtgagaccaacctggccaacatggtgaaaccccatctctactaaaaatacaaaaattagctgggctggtggcgtgcacctctaatcccagctactcaggaggctgaggcatgagaatcacttgaacccaggagacagaggttgcagtgagccaagatcatgccactgcacttcagcctggacaacagagcaagactctgtctcaaaaaataataataattattattattacactctccaattccatccaagctgctgaaaatgccattattttgttccttttcatggctgagtagtattccattgtgtgtgtgtgtgtgtgtgtgtgtgtgtgtgtgtgtgtgtgtgtatacatatatatatatatatatatatgccatggaatatatataagttgtgatatatatcacactttatttactcattgattgacaagcatttgggttggttccatatttttgcaacagcaaattgtgctgctataaacatgcatgcgcaagtacctttttgctataatgacttcttttcctccgggtagatacctagtagtgggattgctggatcaaatggtagatctacttttacttctttaaggaatctccaaactgttttccatagtgattgtactagtttacattcccaccaacagtgtaagtgttcctttttaaccacacccatgccaacatctattattttttcattttttgattatggccattattgcaggagtgaggtggtattgcattgtggttttgatttgcatttccctgataattagtgatgttgagaatttttccatatgcttgttggccatttgtatatcttcttttgagaattgtctattcatgtccttagcccactttttaattggattgcttgttttttttcttgctgatgtgtttgagttccttgcagattctggatattagtcctttgtcagatatatagattgtgaagattttctcccactctgtgggttgtctgttaactctgctgattatttactttgctgtgcaaaagctttttagtttaattaaatcccatctatgtatctttggttttgttgcatttgcttttgggttcttggtcatgaagtcttttcctaggccagtgtctagaagggtttttctgatgttattgtctagaatttttatggtttcaggtcttagatttaagtctttgatccatcttgagttgatttttgtataaggtgagagaccaggatccagtttcgttcttctacatgtggcttgccaattatcccagcaccatttgttgaaaagggtgtcctttccccactttacatttttgtttgctttgtcaaagagcagttggctctaagtatttggctttatttctgggttctctattcagttcagttggtctatatgcctatttttataccagtagcatgctgtttcggtgactatgaccttatagcatagcttgaagttgggtaatgtgatgcctccagatttgtttcttttgtttagccttgctttgtctatgcaggatcttttttggttccatatgaattttagaattgttttttctagttctgtgaagaatgatggtggtatttttgacaggaattacactgaatttgtagattgcttttggcagtgtggtcatttacacaatgggatttgtttccatgtttgtgttgtttgtgatttctttcaacagtgttttgtagttttccttgtagaggtcttttacctcctcattaggtatattcctacgtattttattttactttttgcagctactgtaaaggggatcgagttcttgatttgattctcagcttggtcactgttggtgtatagcagagctactgatttatgtacattaattttgtatcctgaaactttgcttaattcatttaccagttctaggacctttatgagtgagtctttagggttttcctcctataagattatatcatcagcaaatagcgacagtctgacttcctctttactgatacggatgcccttgtttctttctcttgtctgattgctctggctatgactttcagtactatgttaaatagaagtggtgaaagtggacatttttgtcttgttccacttctcaaggggaatgctttcaacttttccccatctagtataatgttggctgtgggtttatcatagatggcttttattaccttaaggtatgtaccttctatgccagtttttctgagggttttaatcataaagcaattgtggatttttgtcaaatggtttttctgcatctactgagatgatcatgtaattttgtttttaatcccgtttatgtgatgtatcacatttattgacttatgaatgaaaagccatccctgtatccctggtataaatcccatttgatcatggtggattatctttttgatatggtgttaggtttggttagctagtaatttgttaaggattgttgcatatatgttcatcagggatattgatctgtagtttttgttgttatttttatgtccttccctggtttgggtggtagagtgttattggcttcatataatgatttaaggacaattccctttatctctgtcctgtagaatagtgtcaataggattggtaccaactcttctttgaatgtctgatagggttcagctgtaaatccatctgatcctggacttttttttcttggcaatttttttattaccattttaaactcactgcttgttattggtctgttcagagtttctatttcttcctggtttaatctaggagggttgtatatttccaggaatttatccatcttctctaagttttctagtttatgtgtgtaaaggtgttcatagtagccttgaaaaaccttttgtatttctgtggtatcagtagtaatatctcctgttttatttctaactgagcttgtttgaatcttctcttgtcttttcttggttcatctcactaatgttctgtgaattttatttatcttttcaaagaaacggttttttgtgtcatctcttttgtatttttttgtttgtttgtttcaggttcatttagttctgctctgatcttggttatttcttttcttctgctgggtttggggttgttttttttcttgtttctccaggtccatgaggtgtgaccttagattgtcactttgttctctttctgactttttgatgtacgcctttaatgctatgaatgttgctcttcgcaccacttttgatatatcccaggggttttgataggttgtgtcactattattgttcagttcaaagaattttttaattttcatcttgatttcgttgttgacccagtgatcattcaggaacaggtcatttaattttcgtgtgtttgcatggtttcaagggttccttttggagttgatttcaaattttattccactgtgatctgaaagagtacttaatataatttcgattttcctaaaattactgagacttgttttgtggtctatcatgtgatctatcttgaagaatgttccaggtgctgatgaatagaatgtatattctgcagttgttgggtagataagtccatttgttgtagggtatagtttaactgcattgtttctttgttggttttccgtcttgatgacctgtctagttctgtcagtagagtattaaagtcctcgattttttttttttttttttttgagacagagtctcactctgtcaccaggctggagtacagttgcacaatcttggctcatggcaacctccaccccctgggttcaaaaaattctccagcctcagtctccccagtagctgggattacaggcacacgccaccacgcctggctaattttttgtatttttagtagagaagatgtttcactatattggccaggctggtctcaaactcctgacctcaagtgatcctcctgccttggcctctcaaagtgctgagattacaggcttgagccaccacgcccagtctaaagtcccccactattattgtgttgccgtctatctcatttcttaggtctagtagtaattgttttataaatgtaggagctccagtcttaggtgtatatatatttaggattgtggtattttcctcttggactagtccttctaccattatataatgttcctctttgtcttttttaactgctgttgctttagtttgttttgtctgatataagaatagcttttcctgctcgcttttggtgtccatttgctggaatatctttttccatccctttaccttaagtttatgtgagtcattatgtgttaggtgagtctcctgaagacaccagacactttgttggtgaattattatccattctgccattctgtatattttaagtggagcatttggccatttacattcaatattagtactgagatgtgaggtactatgccattcatcatgctatttgttgcctgaatacattggcttttttattgttattgttatatagaccgcatgagatttatgctttaaggaggttctattttggtgtatgttgaggttttatttcaagatttagagccccttttagcagttctttaagtactggcttggtagtgggaaattcccttagcatttgtttgtctggaaaagactgtctctttccttctttcatgatgcttagtttcactggatacgaaatttttggctgctaattgttttgtttaaggaggctaaaaataggattccaatcccttctagcttgaagtgtttctgctgagaaatctgctgttactctagtaggttttcctttataagttacttgatgtttttgcctcagagctcttaagattttttccttcatcttgactttagataacctgactatgtgctaggcgatgatatttttgtgatgaatttcccaggtgttctttgagcttcttgtatttggatgtctggatctctggcaaggccagggaagttttcctgaattattccctcaaatatattctccaaacttttagatttctcttcttccccaggaacaccaattattctttggtttggatgcttaacatagtctcagacttcttggaggctttgttcatttttgtattctgttttcctttgtcagaagggttaatttgaaagcctcgtctttgagctctgaagttctttctcctgcttgttcgattctattgctgagactttctagtgcattttgcttttctctaagtgtgtccttgattttcagaagttgtgattttttaaaatttatgttatctatttcactgaatatttttgttttttaattttttttattattattatactttaagttttagggtacatgtgcacaatgtgcaggttagttacatatgtatacatgtgccatgctggtgtgctgcacccattaacttgtcatttagcattaggtatatctcttaatgctatccctcccccctccccccaccccacgacaggccccagtgtgtgatgttccccttcctgtgtccatgtgttctcattgttttccttttatatcctatatcatgttttttatttctttaagttggatttcaccttcctctggtgtctccttgattagcttaataatcaaccttcttaattctttttctggcaattcagatttcatcttggtttagatccattgctggtgagctggtgagatcttttctggttccatctcatttgcgtagactatttcagagggaagatctgggatccaagggctgctgttcagattcttttgtaccatggggtgctcccatgatgtggtgatttccccctttccctagggatggggcttctttagggctgaactgcagtgattgtttttgcccttctgggtctggccacccagtggagctacaggacttcagggtggtactagggagtgtctgaaaagagtcctgtgatgtgatccgtcttcaggtctctcagccatggataccaaaacctgctccagtggagatagcaggggaatgaagtggactctgtgcaggtctttggttgtatttttttcagttgtgccaattttgtgttggttggcttccagtcaggaggtggtgctttcaagagcgcatcagctgcagtactatagggtatagggaggatgtaaacttgccctagggttgcctggttaagtattcaggtttcttaggtggtgggcagggttatagagctcccaagatattacgtcttttgtcttcagcaaacggagtgggtaaagaaagaccaccaggtgggggtaggcgtaggtgtgtctgagctcagactcacctctgatggggtttgctgtggctgttgtgggggatgggagtgtggtttccaggccaaaggagttatattcccagggggattatggctgcctctgctgagtcatacatgttgccagggaagtgggggaaagcagtcacaggcctcacccgctcccacgtagcatgcagtcctaagggctggtctcactcccacagtgccctaccagtagcactgagtctatttccaggcagccagtgaccagggctgagaacttgcccagaccactagtctcctcattgagacagcaaacagactcagtttttcagcatctcagggagcctgcagcagtgatctagttccttcaaagggtctgtggattctctcagttttcctgatatgttcctgtggcagttcttggagcaaaagttcattatgtgagtctccatatgctgttctgtctgtcctagcaggagctgcaaacttttcctgcctcctatctcccatcttctccacaatccccatcaattcatttttaatcattattgctaacatatttctagcaatatggcaaactatatgtagaacattatttggggtgaatataatttaaaatactagaatctcttgaacctaggaggcagaggttgcagtgagctgagattgcaccactgcactccagcctgggtgacagagtgagactccatctcaaaagaaaaagaagccaatctgaaaagggtacgcactgtacacactctatgattacagctattctggagaaggcaaaactgtgaagacaagaaagaaagaaaaacagtggttgcctggggctggggggttaggaagacaaatagtcagaaaatagaggattttagggcagtgaaacaactcagtgtgatactatgatgatggatacatgtcattataaatttgtcctaactcatagaatgttcaacaccaagagtggaccgtaatgtaaactatggaatttgggtgataatgatgtgtcaatgcaggtgtaccgattgtcacaaaggtaccactctcttgggggatgttgataatggggaaggttatgcaagggtgggatcaaaggtatatgagaaatctgtataccttcaacttaattttgctgtgatcctaaagctgctctaaacaatgaagtatatttttttaagtcggaaagaataaaatgtctcttctaaagaggggtgacagacattcaaaaaaatttagtttgattaattttagaatttcttaagtaaacatgcatgttaaatatctttgaaaaatatgagattaaaacagaatttttaacctccaaatactaaacttatatagttttaatattgtaagatcagagatgacagagagagcatgcaattctgtcaattacaaaatgaaattggtaattccacactcataggatggatgattttaaaatatttatcttcatttatgaatggatcaaggatttaaaaattcatttaggatacagtatatttgaacatcacagtagctagttcctaaagaacagttgtttcaagtttacatagagtatatataaaagttgactatatactatgcccaaagtgcactgtaaaatctcctaggaactctttaaaagtgcaaatgcttgagttctatccccagcaatactgatttaattggtctggaatgggttctaggcatgagcagatcataaacctttgtaggtgattctaatgtaaatctaggctggagaaccatttttctagaacataaagtaggtctcagcaaattttaaagattgcccatcatattgaatatattctctaaccactatgcaataaagaagttaattttttaaaactaaaatttagaaaacatctcctatagttaaaatttaaaacacctttaagtaactctgaggtcaaaacataaatcaaagggaaattggaaatacaacaatgaaaataatgaacatcaaacttgaggaataatacatattctatcaggtacttgtttttgcctttctgtttcaggaggtttttcctctctcctttttttcttttcttttttctttttttaaactagttaagttggttataaagttcatttgaaaaaaaacagatgagcaaaagtagccagaaagccaggcgcagtatcacatgcctgtaatcctagctacttgggagtttgtagagggagaattgcctgagcagaggagttcaaggcccgcctaggcaacacagcaagacctcatctaaaaaaaaaaaaaaaaaaaattaagccaggaaaaccctgaaaaataaaactaatagatatagtagtattcctaccagatattataacctatttaaacttctataatttaaaaagtgtgatattagcacatgaatcaaaccatagaacagaatagaaatacagaaatatatctaaatgcagataaaaatatagtatattaaggttaacatctaaaatctgtaggaaaaaggtggatttaagtaagtagtgctggagtaactaagtagccatatggaaaaatctaaatttgaatttgtcccttgtgccacacaccagaaaaaattcccaatgagtcagagatttaaatgtaaaataataaaaccatactaatactaggggaaaaatgctaattcttctacagcctagaaatgtacattatgtcctaaaattcaaaattcagaagtaataaaaaagcttaataaactttactacctaaaaaataaaaaagactttgcattacaaaacaaatcataaccaaaataaaaaagaaagaatcagcaaagtatccagatatgaaaatgctcattgccactttctctgatgactgataattttattttggggttgataacgatatttaaattttgttttgctattaaggtactttaaaattgttaatgatttaattaaattgatatctttcatccgttactaccacaatttcattttctctttttcaaaattcaataccagaagcacagtgtactttaattgatagcctaaagtaaccaatatatcaggtaatcccagaagtaaaacagtgatcctggtactcaaaacagtgcaatctgaaagtctggccttacttcaaaaaaagtaattactcatagtacatatataagtatttattatacataatatttatatactatgtattatatgtcatatatatatatatatagagagagagagagagagagtggtaaactacctgctagagcctccatctgtgctttgtatccttaaaagtcattaataatgctgccaaaaactagatgtaccaagatgaagcaggctaggatcagaaacagcaagagtgctttacaggtaggtggttagacatgagtcagcagacaaaagacaaaaattttatgagtgtgtgcagtggccctgagagaggagccagcctataggcagtttgtggtcctatcaaaaattgcttcactatttatcatggagagatgacagctcggttgcctgttgccatagaaaaccagagctgacagaacttctgagtctccttcctttcttttggcatagaaagaaggaaattggacaattactatattgtttcatggtacttaaatgaagactttcaaaaaatgggtcttcttgtgttcctagcaaagtgaggagagccatgtgatgattgattggttggttgattgaaagtttttgaaaattacaagagtgaacaatctcagatttctatgacgcaggcaggcaaaaatccatgaataaagcacattggggatattaaaacaacagagttaatctgataacaaaagagacaggaggtagaaaagagaaacagaggtgaacttaagtgcaccaagaagtccttcctttcgcaaagagcccatgtagctgagggttgccatatggaaaagggggcctagtgataccatatcatcttctttattcaaaaaacctccaatatctagaagtacatattttgcaatactaccaaaataagttaaaattatttcaaatgatagatccaacaaaacacagctataggtcaccagtttaccatttctcccttgaaagaatagataagttctaaacaagttcactgtcaaaccaggtaatttcattataaaatctggcatgtggtcaacaggaaaaacattcattaatgttgtttccaatataaagcagttacggaagaaagaaccaaaactatatgaagaatcacttttatattttaattaactttattgcatttccttccagcttattttcataagtgtttcttttagggttttgttttatactgtaattttttagatgtttatatcttaggtattttttgtctgacaggatttaataagcagtcttccgtggtaatagaatgtttttgtagccaacctctttaattcattcgtagtagtctaaatatgaatcaattagaaaagaggtctggttgagtctatttgaaagttaattggttgatgatggctggaagagctggctaacaggtaaaagggaagctccccatggtgagagaataaatggatgactactgtgtttcttaagatcttcatcctcttgggaggaggaaagtgattgctctgcctaggactggcaattagcaggagacaagaacaaggtgagaggaaaagagtagagatgggggtggggagtgggggatatctccctacctggtggcaatagcagacaaaaaagttgagtcatttgaaaaagaaaacagatttccacctagtgggagataacttcaggcatgggaaatagcaaaagtagtacattgatttacagtgcacagattttcaagaagcagcacaaatactatgtagataagttgagaaaaccacttacaagcaacctaaaagtaagctaatctgtggtggccaggttggagaatggcagtttacaagaaacccccatactgtctccttcctttacaagaaaggaagagatttgtgagttggcaaaccaaggtatggggcttaactcatttgccagagtgaagcaattcccagagggactgaccattttatctcaactgtttagcacaggatctggcacttaatacatactgttgaaggcaatcacattgtgaataaaacattatgtgctttattctagtagattcctagaagaggaatcacaaagtgaaaacatatacatattttttaaatttctgatggaaattttatgagtatagttttagctttaaatattgttcttgttttaaatataggaatttttttcaaatatggctgttttcattagccataaaatgtcttgatcattcttcctttatgtgaaaggtaatgttttcatttattttttttaacttttccagcatcccacagtatcaggacagtttgttgtacaatgcggtaaaacataaaactgagaacttaaatgtctaataattccgtaccaataaatgttcaccctaactctgctgagacaagtaacagtccaacaactcgttttcatgccaacaatcagctaggtaaattgcttctacctagcctaatgattcatttcattgcagctgttcatattgcaactgttcaccaatgctctttatgtgggcagcaggctcacagaaacagggctgtttgagctcagccaagcgctggggtttgtaagacattgacagacaatagagaaacaactgtgttactctatgctagaggaaaacgtagccaggggacaagttgacaaaataggtacaattagaggaaaaaatccacatgcttccaccggcaaatgtaacatgtgtctgtgtgggtacccattttatcagcttctacttctataacaatgaatgaaccaaacaaacttgcatctaaggccacctcctttgttagtgtgctaatcccctctagcctagtcatagacaccactgtggcaattgcatcctttctttcccacaacacctagcttgttctctttgttggatcatttctataagcatgtaaacatgttgcagcattttccacatttaaacaatagcaacaaaatggctccctgggctgcacatgagtgaccagccacaccctatttctctattccccactacagcaaatttattcgaaacagttacctatattcactttttctgcttcctctactcccatgttcttctgaatctgtttcagccaggattttattccttcattccacagcttctactgttatgaaagcttttattggccaaggcaagaggatcacttaagcccaggagtttgagactagcctgggcaacagagcaagaccccatctttacaaaaataaataaataaattcttcaggcatggtggcacatgcctgcagtcccaactactaggaggtctgaggcgagaggatcacttgagcccaggaagtcgaggctacagtgagccgtgatcatgccactgaactccagcctgagtgacagagtgagaccctgactcaaaaaaaaaaaaaaaaaaaaaattaagaaaagaaaagaaaagaaagaaagtaaagaaaaaaagcttttattggcttctgtccacttttcccaaggtcaataatgccctctactctggtaactattgcttctcagccttttggccaagatcaagtgtatactgatggccattgctcagttctgctttattccacctatcagcaactatttgaagttgatctccttctcctttctatctttatctggcttaccagagcacactcctttgactgctaccgtccctcactggccactctcttcctcaccgttcattaatgactcctcctcacctccccaacctctaaacttgaaagggcacaagcacaatcctcagaccccttctttacctagattcttttagcaagtgattttattcagtcccatggttgtaagcaacattgataccctgatggttcccaaatttatatcttcagttggtatttctgcccagaaccctgggttgaattacaaactgccgagttaaaatttccccttggaggaatcagatatggcaaaatgcatgtgtccaaaaccaactcttaatttcccttacctctttcagacccactcctcctgcagttttccccatctcagtacaaggaatcttcattcttctctttgctcaacccaaaaatgcaccctattttttctctcctacaatacagccaatccaaaagcaaattctgtcggctattcctttgtgttatatctagactttgccgtatctcagatctccactgctactctcctagttcatctctctcacatagctattgcagtagccttctaactgctcacctagcttccaatctttgccctcatatggtctatattcaccggagtagcctggatgatcctgttgaagggcagatcatccctttctcctctagattctccagtggtttcccatctcatgccgaggtaaaagctgaagtcctcatgatggcccacagagccccatattatctgccttcaacttgctaaccccccactgcctcactaacctcagctcctgccactgtcattctctcactctgactcaaccactctggaacagtcttcccccagatatctgcataactcttccctcactcctttcaaagcctctgctcaaatgttattttcctggagaggccttttctgaccactctgtagaaaataccaatacctttcactctttgtcttccttactttgttttccttcatagcatttatcatcacctgacatattctatattttttaagtttatattatctgtctctctttattaaaaagtaacatatcttcaaatataaagataggagtttgttatgcttatttctatattcccaattcctaaaagactttctggcatataataggcctatgataaataaattctgaatgaatgtttgaatgaatggatggatggatgggagccttttagctttggaaggaagataatgtttcttcccataaatgtgtgattttattcttaaattattaaatgtaaaatatcatcaagttaatatctcttaagtaactctgagcctcttccatgaatacatttatttgatcaagcttcatgtctgattttataatatttttatcacaaaatatcaccaagtctttttgaatggttcatagaaaattcacaatttaatgtacttttaagctatttgaggtcaagaacaaaattgaaccctcaagctttaactgattccacaagtacaagaagtagaagttatgcatttgacttcctctctacaattgttggtttcaactgcaattattctaatgactcatatgataaccagatttggagaaagcactgtaatcagggattgattgcactaagtgttcacctccagagtctaggacacgatttaagactcaaatgaaaggaaaacaatggtttaagtctggacttcagagggcatcagtccaggcaacaaaagtatcaggctgagggacacagcaagccttctattcagggcaaatctaattggagaaaggttttacttcccccaggattaagatccaactggtggccacatgaaagagctctcaaggctgttgcacttttacctacttggagctcaatacagtgcttttctcacactaatgagcgatgcatttactcacatgcttttaaaattagaagcagagggtattttttaaagtaatgaatgttttgcttaaaccgtaccaacatgtgttttgaaaggaactgaaaatgtaacatatggttcatgtagacttaaataggtcttgttcagacattaatctaaggggaagagaggggctgtttgcctagtttgcctccttaggtacagcaatctttactcaatcatcaatctgttcttacatcagcacattgggttttaatgagacctggaaaagtacttcagtccctactttataaatataatttttaaaagttcactaaagaatataaactacattatgaaaggaattgtgttttgtttattaacaggtaatttatataagcaactacaattaaattaccacacttacctcactgtcagtgtagggcctcagtaaagaaagttctgaagttaacaagtcttcctcatcaatgaccaggtgaaaagttatccaggtgttaacagcagcagcaaaaagtttctgtcttggtttcttcaaatgagcatctggttctgtatcacccactattcctagtctgtgtcatactataatccacatcatttaaactaactccatgcattggtgcaaatacaaatttagaaagcccagcaacttactgtctcactgccgacctaaggccaaagcctgtgctgctatatgtaaaccacctgcagctccaccccagaaggatataactcaggctataactcctctctgaacccccagcgctcatgtcagccgtgtttctgatatccagcctgtctttggtatttggtgtgacaatgttttgtctgcagcgtctcttctgcttgcagccagagaatatttttggtttttaggggcttacatgattatattgggcccacccagataatccaggataatctccccatgttaaactctgtaacctgcaacattccttttgccatgtaatgtaacatattcacaggttctaggaataggagcatggacatttgcgggtgggttgggggcagcgggggcaggtcgtctgccagcactttttttttactcacacctgaagtttatttgctctggagaatttaaatagtttactggtgcatagtacaatttggactggtgaacacagtaaaggaccaaacaaaacttaaacgatgaaaatgaaaacttccaagaccttaggtttaattggtgaaagaagaaagctgcctgttcactaacagaaatacatatgagaattcaacttaaagtgaaatattggcaaaggacttcagcagttaattagaattcctaggcaatttgcttctcccaagatgtattttgggaggtgtggggaggagtttattgactgtcagctttaaatgcttagacatgctaatttacattaattctaaagctaatttttcgtgccaatcagccctctactacagcttctaatagcagatttctagttcgtgggttgctggtgacctctgaacgaaagagacctactagcattctgtcatttgatgacacagatgttacttcaaaaaaagaaaaaaatagacggtattttaaaagtcattagttgtttgaaactcctaatgcatttttccattgtaacaatgttaaaaatgacagtcagatgaaaagagagcctaaagaattcaatttagattataatttatttaagaccagtgctgtatgaaaagaactatggaattaatctgtgagaaattgtactcttgagttccagcttgaaacatgactgctacagtgcccttgacattgtctcagtgtcccttggtggaccaagtgccaatcagttagagagaaacctccaagtccctgatgtagctcccaaagcctgggcagaaagtccttcagagcattgccttaagagaagtgggaaaaacaagattttccatttccattacagccatgtttttatcatccctagttaacaggataggaaaatacagtctaatgaatttttcttctctttctgttcccatcataaacacaatctttaattcagttgaccctagaacaacaagaatttgaactgtggtaccacttatccctggattttcttccttctctgccatctgtgagacagcaacacgatctctcctcttcttgctcctcctcagcctactcaacatgaggacaactggatgcagacctttctgatgatccacttccacttaggcaatagtaaatatatggtctcttctttatgattttaataacattttctcttctctggcttgctttattgtaagaatgcagtatgtaacatgtataacatgaaatatgtacccatccatatgaacaagtaaggcttctggccaacagtaggctattagtagttaagtttgggaggagtcaaaagtcatatgcaattttcagctacacaggaggtctagtgcccctaacctctacatcatttatgggccaactgtaatttgcaataaattttgactgctagaaataataagaaatattagtttttatgatatttattctttcttatagtgtaatttacatgtccacaatagtaaatttgaaaaatatcacaaaataaaagtaaaaatgacttataatcactcagatataacaccatactgattctttgttgaaaaatacaaatcactgaatgaatacattcaccgtataagacccgaatgaggctttacttggttgtacaagctccctggcaacatgcaatagtctccccagcactggctcctattgtacaggctgccgaacaaaagcatggattaagttaagaaaaaagaggcacagtagcaatcagttacaacaaagcttgaactctgcttagaacggcctttgaacagtgtcgtttaacacccataaacatgcactcacactgccctctagtgccggtccactagacatcatgcagccacacacaataattgcaaagctgaaaaaagatcaaaggaaaacaatggctaaggggtagacggaaatgagaaaaagaattatattgtgtgcacccagtgaattcctattctgggaaaaataaattatcataaagcacttattttcctctcctcctcccacttctgtctttctttaccaacacaatagacaaactctctttttttcattttaaccttgcctgtaagtggaaggaaaatagtccctataataaagcgataaataaagagtcccatgttattataaatatttggatatatgtgaaaaattaattagtcttgttttaagtaggaatctaattaacagaaaaagcacgacgcactaaagaaaaatgaagatgacattataaatcacaagaaaataacagattatttttaaaatggtgttagatggtaaactgtatgtaaaagaaagaaaattgtatttagctccttatggcatgccaaaaacccaaatagatttcatggatgaagttaaaagtaaaatcaatttttaaaaattatataaaaatcttcatcaaatatatggagacatttctaaggtggaagaaatgacaaaggcaaatatgaataattagacttcatcaaaataaaaactctcctattttaaaaaatagaagaagacatgaaaaacggagaaaatacttaatatatatattaaaagcttacacagagattttttttaaaaaagaatatgactccaaaaccaaaaattcacaagttagaaaaaagtgacttataagtaaatgtgcaagcattcatcttgagagtaacctagaaaatgctcactaaaattacatgccaatttttggctaccaaaatagcagaaatgtttttaaaatactacccaatgctagagaaggggagataaaataaacattctcaaatgttaatgatacttctttagaaaaccaatgagtaggtatcaggattcttagaaatatctatatccaaaaatattcaatgctactatttgggggaatttattacagggaaataaataatctcaaatgtataaaatcttcatggtcaaagatgacattaaaacatctttgttggagtatctgtattaatacaaaatatgtttgttcattacctataataatataaaatgtgtattcatcttaaatgcccaatgatagaacaatacagaatagccttaaggagaattgtcccactagtggattctgccatgctgcagaacagattactgattcattgatcttccgagccctcaaaaatgataacaagatttgtctgtgcagccagtgccacaagacagttgcctctagcctcaaacagcttcatctgtttgcctcttaatgccttaaaagtagttactttccaatgtgctataatgtgaggaacatgtaaagaacttcttatagcatatattaaatgtgtttattaacaaccattaaaatatttacaaaaagaatacagggctgtccatatcaactaatctcaaatatatattttcaaactgataaataaaacaaagacttaaagaatatgcaccaaaattttaataataacttcctttgaatagtagacttaaaactcatatttttcttttccttcaccttttggtattttctaagtccccaataataactacttatttttgaccatttaaaagtaatttttaaggtcttaaatggtaaaattcgtaacaaatgagtataaaaatacttcaggggaattgaccatttcccagtagttatctattgaattatttacaaaataaaatctaccatgagatagtataatagtgattgtccagtaagagagctatgttttaaatatattattgcactgttcgggctttcactgggaaagaattttaaaaataataaacaaatgcattattgcatggttatctttctgtttttctaatcttttaaattacttcaagcagtccacagagagcctgtcttcaaaaactgagtaattatttatctagatatgatgtagagaggattcttgtttaagtgcaattgaattagaagatttatgagatgtcctccaaagcttgtcttctgtgccccacttcacaaaaattatggcatattattggtgttagagccccatatttatttcaagaaatacttcaacactgaaagaaattaaattccataaattctgtaatattaccaatgttgacatattttgctaatttaaacttaaaattttgaagttccagtttatactctctacctgtctgcttgccaaagagatttttctaaagccaaggaacagctgaatctaaaagatgggagggatagttactatgtgcataaattttaattgaaagaattatgagctcatagctgttaaaatagaaaataacaggttcatttgcataccttcccaaagtataaaaaattaaagcatttgttctaggctgcggaggcagggattttagtggagctaggattcaatatttgcaatattgtttatattttaaactatatggaccatgataattatccagaaactattaagattgggaatgattcaaaaacattccttcccagccgggcacagtggctcacgcctgtaatcccagcactttgggaggctgaggctggcagatcatttgaggccaggagctcaagaccagcctggccaacatggcaaaactctgtctctaaatacaaaaatacaaaaattagccagcgtggtggcacagtctataatcccagctactcacaaggttgaggcatgagaattgcttgaacccgggagatggaggttgcagtgagccgagatcatgccactgcactccagcctgggtgtcagagcaagactctgtctcaaaaaataaaaaataaaacttcttcaccttggtctaccagtccatctactttcagttcagtccactggttttgattcacaccataacctgacgatattggagatgtgaggagaaaaggaagtagaatttaaacaatttaatctcgttaattgtaaccaagagacattttgtaaatagaaaataacattagaaaaagtagtcttactctaagaaaaatttccagaatttttaccatgactatcacttaaatgcaactagttgaaagtattcattcatggaaatgtcctagtggtaaatttccatacgtttaattgaatggttcttagtattaaaaaaattgaaaatggcaggcaatatattttaataattcctaagatgtcacacaaatgcctcagatagagctgagtttatcactgacaaatagaaaggaaaaaaagcataaagagcttcagatgtatgcattagttaactgaattaaaccaatttaaaaaaaacattgcttctcatacaatgttgctcttaatctgcagtaattagttttggaaatgcttaggtctcgtttctttgaagttgcaataaaaagttataacaatttagcatctttgtattactcaaacaagaaattgaacatgttaaacaaaattttgtgggggtcttgccattttatttggcttgatttggattgaaagcaaaagaagaaagaaagagagattggatgatagagggaggaaaggaagggaggatgggaaggagaaaaaaagtaggaaaggaaataaactgtattttagattccaattgtctctcctcttagggaggctaagaagaaagattaaagaattcaccacctgcagatattggaaattatgagcatttttcaaataccatacttggacaaccctataaatttggcaaaagggatctaatacaatcagattgaaattctgggcaattaaatttctatccaaactaactgcagttttcagacaatgaaaaacttgaaagctttcagcagtttttccttttattgattgttgtggatgtcaggacattgtcatgaaccaccatcatatatcatattcagcaagaatccataagtaccaataaatggctcattggaaatggtacttatatgcaatatattaacattcagtagtcttttttatgtattatttttgagagagagagacagatggggtctcactatgttgcccaggctggtctcaaactcctcacctcaagcaatcctccatcttggcctcccaaagtgctgggattataggaatgagccactgcacctggccaacattcaatagtcttgattttattgtttacttataaagttatggccaattaatttatatctaaattattattatataagattataatgaagaagagttaaaaattctgttataatttccaatatgacactaaggtgcaacagatggagtttaaaaaaggggttcaaattgtaaggatcttgaaaacatgctttcagaagaaaaatccagttgtgggcgtaactttactatccttcaaaatataaaggtgtactctaatgatcacttcctccatcattgattaataattgtaagaaaactctcatttgctgaaaaaaataaacccagcacctaggacaataaatacataccatatactcccaaatagatgacgggtctccgacttgttttctgcctcttaggagcttataaagctaaagttcacaattaatggggaagggaggagacagatgatcttcattgccttagttataaacttgctttggtctatggtgatcctgtgttaaattgtgaaatagaatctatcatgctggctcttagaggcccttgacttcatccttttagtgcttttcttacttattttcaaaccttcacctctctcacgttgaaaatcccaactcttaacaccctctctaacaaactaccccttcccaccaaccaccaccacctacctcactctatcatctaaatctgtttcaagatacaaaaatcttggtaatttatatcttaacacaaattacctactacctcttcaaaaagcaagttaagcctgattctaattgtgggatgaaaagctttttccctatgaagaaattttaaatatcatcaagcatgtggagaggtgctagcgagggaatggagcaaggaatcaaattccataggcgattgttttctctatctttgtataaaaatgtccttgccccaattaaagcctccaccaagtacaaggttgaaatgtgctttttattccactcattaaagagaattagctaacctagactataaagtcataataacattcatacaaaggtagattcaaatctgttatttgtccctgatgaaaatgatacttatatttggttttcaaagactatctaaataacaaatgacatttagaagaatcttcatttactaataacttgaatctgctgtatacaaatgaacaaatgaattcattttcaaagagggatatgatatagaatctggaaactatcggtcacacagctttatcagatctttggcagaacaccagaatcaatggctaaatgtgatttttgagcacttagaaaataaaaggttcccaaatgtccaccaatgatagactggattaagaaaacgtggcacgtatacaccatggaatactatacagccataaaaaaggatgagttcacgtcctttgtagagacatggatgaagctggaaaccatcattctgagcaaactatcgcaaggacagaaaaccaaacaccacatgttctcactcataggtgggaactgaacaatgagaacactaggacacagggtggggaacatcacataccagggcctgtcatggggtggggggaggagggagggatagcattaggagatatacttaatgtaaatgatgagttaacaggtgcagcacaccaacatggcacatgtatacatatgtaacaaacctgcacgttgtgcacatgtaccctagaacttaaagtataataaacaattaaataaaataagaaaagggttcctagatagcaagtgagttttgctaaaatttttttaaagtccaattaatattattttagtaaataatttgaaaatgtcttgtaatatctttcatacagttggaaaagtgtaccagtgaattcatagcaagctgaacaattgtgcccactgaattttaataaatgaacctgatctctaatgacataactacagactctgtattaagagtgttaacttgatctctaatgatataactacagaatctatattttgtattgtgaagatcaacaattctttgccaggaccaagataaactcatagattccaaatccataaataaaataagataggatagttaatatatctgtgatggaataaagagtagtaaattgaaataacagagtaaaacaaatgcaagcagattttggaggcagtgcaaggtagccaaatagaagcctcaagcaatcttacttcctacaagaacaccaattgaacaactatccacccaaaatatgttatcatccataagtaaggacttcatcttgccagtttgttatttgctttctggttgatttgtggtcttctcttccttctttctttccttccttcctgtctctttttagtgaaggtgatcttctctggtggtatgttttaattcatttttttgcatctgttgcatgttttttgatttgagcttatcatgagggttgcaaataatatactataactcattattttatattcaatgataacattgaaagtaaatggaccaaactcaccaaccaaaagacatactgtggctgaacggattaaaagatacacacttcacctataaagacacacagagactgaaaataaagagatggaaaaagatatgccatgccattaaaaaccaaaacgaagcaggagtagctatgtgtatataaggcaaaataaatttcaaaacaaaattctaaaaagagtcaaagaaggtctttatataatgataaaggtgtcaattcagcaagaggatataacaatcataggaaaaatggtggatagaagacaggactaacacgcagctcccactggatggatagaacagtgtctggagacacacattatgaacttttgctccaagaaccactgtaggaacatactggaaaaactggaagaattcacagaccctttgaaagaagtggcttgtcactgcagatgccaaaaaccagccaaaaaaccctgaagacaaaagacgtaagctcttgggatctctatggccccactcatcacctgagaaacctgagtactcatcctggccaactcagggcaagattatatcccccttctactactgcagctgtactctcttggaagcaccacctcctgacaggaggccaatcaactcaagccattacagcaactcataacagaacaccctgctctaaagaaggagaaaacaatagataactccactgcctgcaacgccctggctaatcagaggtcctgagtccatccacatgacaacttgactgctagcataaccagcattcaagaaaaccagcacaccaaaaaataactacaaccaaggactcccatagagtcccttttactctcctgccacctccaccagagcaggtgctggaatccatggctgggagacctgaagatagatcaaatcacaggacacttttcagacattcctcagcaccagcctggcacccagtagccctactgggtggctggattcagaagaacaataacaatcactgtggtctagctctcaggaagccccatctcgaagagaagggggagagcaccaaatcaagggattactccatgggacaacagaatctgaacagcagcccttgagtccaaaatctttcccaaatgagaaggaactaaaaaagtaattctagtaatactattaaatgaggttctataacacccccaaaagatcacactagctctccagcaatggatccaaaccaagatgaaatctctgaactgacagatgaagaattcagaaggttgattattaagctactcaaggagccaccagagaaaggtgaaaaccaacttaaagaaattaaaaacaaaaaggaggatatgaatgaaaaattccatagaaagatagatatcgtaaagaaaagacaattacaacgtctggaaatgaaagacacacttagagaaatgcaaaatacactggaaggtttcaacaatagaattgaacaagtagaagaatgaacttcagagctcaaagacaaggccttcgaattaacctgatctgacaaagaaaaaaataattttttaaaaaatgaacaaaggctctccctctccctctccctctccccctccccatggtctccctctccctctctttccacggtctccctctgatgccgagccgaagctggactgtactgctgccatctcggctcactgcaacctccctgcctgattctcctgccgagtgcctgccgagtgcctgcgattgcaggcgccaccgccacgcctgactggttttcgtatttttttggtggagacggggtttcgctgtgttggccaggctggtctccagctccttaccgcgagtgatccgccagccttggcctcccgaggtgccgggattgcagacggagtctcgttcactcagtgctcaatgatgcccaggctggagtgcagtggcgtgatctcggctcgctacaaccacctcccagccgcctgccttagcctcccaaagtgctgagattgcagcctctgcccgggcgccaccccgtctgggaagtgaggagagtctctgcctggccgcccatcgtctgggacgtgaggagcccctctgcctggctgctcagtctggaaagtgaggagcgtctctgcccagccaccatcccatctaggaagtgaggagcgcctcttccccgccgccatcccatctaggaagtgaggagcgtctctgcccggccacccatcgtctgagatgtggggagcgcctctaccccgccgccccatctgggatgtgaggagtgcctctgcccggccgcgaccctgtctgggaggtgaggagcgtctctgcccggccgccccgtctgagaagtgaggagaccctatgcctggcaaccaccccgtctgagaagtgaggagtcccgccacccggcagccgccccatctgagaagtgaggagaccctccgtccggcagccaccccgtctgggaagtgaggagcgtctccgcccggcagccaccccgtccgggagggaggtgggggtcagcccccgccaggccagccaccccgtccgggagggaagtgggggggtcagccccccgcccggccagccgccccatccgggaggtgaggggcgcctcagcccggccgcccctactgggaagtgaggagcccctttgcccggccagccgccccatccaggagggaggtgggggggtcagccccccgcccggccagccgccccgtccgggagggaggtggggggggtcagccccccgcccggccagccgccccgtccaggagggaggtgggggggtcagccccccgcccggccagccgccccgtctgggagggaggtgggggggtcagcccccccgcccggccagccgccccgtccgggaggtgaggggcgcctctgcccggccacccctactgggaagtgaggagcccctctgcccggccaccaccccatctggtaggtgtacccaatggctcattgagaacgggccatgatgacaatggcggttttgtggaatggagagggggggaagggtggggaaaagattgagaggtcggatggttgccgtgtctgtgtagagagaagtagacatgggagacttttcattttgttctgtactaagaaaaattcttctgccttgggatcctgttgatctgtgaccttacccccaaccctgtgctctctgaaacatgtgctgtgtccactcagggttaaatggattaagggcggcgcaagatgtgctttgttaaacagatgcttgaaggcagcatgctcgttaagagtcatcaccactccctaatcttaagtacccagggacacaaacactgcggaaggccgcagggtcctctgcctaggaaaaccagagacctttgttcacttgtttatctgctgaccttccctccactattgtcctatgaccctgccaaatccccctctgcgagaaacacccaagaataatcaataaaaataaataaataaataaataaataaataataataataataaaaaaaaatgaacaaagtttccaataaatttgagattacattaaacaacaaaacataattgttgttcctgagtaagaagagaaatccaaaagtttggaaaacttatatgagggactaatcaaggcaaacttccttagtcttgctaaatatctagacatccaaatataagaagctagaagaacacccaggaaattcatagcaaaaagatcaacacttgggcacacagtcatcaggttgtctaaactcaagatgaagaaaagcatcttaagagctatgaggcaaaagcattaggtaatcttaaaggaaaacctatcagattaacagcagatttctcagtaggaaccctgcaagccagaagggattggggtcctgtctttaacctccttaaacaaaacaataatcagccaagaattttgcatccagtgaaactatgcttcataaatgaaggaaagatatagtctttcccagacaaacaaatcctgagagaattcaccactaccatgccagcactataagaactgctaaaaggagctctaaatcttgaaacaaaacctcaaaatacaccaaaatggaacatccttaaagcaaaaacttcacagaatctataacaataacaccatgaaaaaaaaaggtatttaggcaacaactagcatgatgaataaaacagtacctacctcacatgtcaatactaatattgaatgtaaatggcctaaatgctccgcttaaaagatacagaatggcagaaaggataaaaatccaccaaccaagtgtctgctgtcttcaagagactcatctaacacaaaggactcacataaacttaaggtaaaggggtgaaaaaagacattccatgcaaatgggcaacaaaggcaaccaggagtagctgttattctaacagacaaaaaagactttaaagcaacaccagttaagaaagacaaagagggacattatataataataaaaggattagtccaataggaaaatatcacaatcctaaatatatatgtacttaacactggagctcccaaacttataaaacaatcattaatagacctaagaaatgagacagatggcaacacgatattagtgggggtcttcaatactttactgacagccctagacaggtcatcaagactaaagtcaacaaagaaacaagggacttaaactataaactacaacaaatggactttatagatatttacagaacattctacccaataactgcagactatacattcttttcataagtacgtggaccattccccaagattgaccacatgacagaatacgaaacaagtctcaataaatttaagaaaatcaaaattatagcaagtgctgtctcagaccacagtggaataaaattgaaaatcaattccaaaaggaaccctcgaagccatgcaaatacatgaaaattaaatcacctgttcctgaatgatcatttggtcaacaatgaaatcaagatgaacattaaaaaattatttgaactgaacaataatagtgacataacccatcaaaacctcttggatacagcaaaagcagtgccaagaaaaaaattcacagcattaaatacctgcaacaagaaatctgaaagagcacaaagagacaatctaaagttacacctcaaggagctagagaaacaaaaacaaaccaacccacaacccagcagaagaaaagaaataaccaaagtcagagcagaactaaatgaaattgaaacaaaaaatacaaaagagaaatgaaacaaaaacactggttatttgaaaagtaaacaaaataaatacagcattagcaagattaaccaagaaaagaagagataagatccaaagaagctcaactagaaacaaaatgggagatactacaactgatagcaatcggcatagaagggccataacttaaggtaataaaagccatctatgacaaacccatagccaacatagtactgaatggggaaaagttgaaagcatttcccctgagaactggaataagacaagaatgcccactctcaccacttctattcaacatagtactggaagtctcaagcaaagcaatcagaagagagaaagaaatcaatggcatccaaattgataaagaagaagtcaatgttgctgtttaccaatgatatgattgtatacctagaaaaccctaaacactcatccaaaaagctcctagatcttataaatgaattcagtaaagtttcagattacaaaataaatgtacacaaatcagcagcactgctatacaccaacaccaaccaagctgagaatgaaatcaagaactcaactccttttacaacaggtgcaaaaacaaaacaaaacaaaacttaaaattataccaaaccagaattggaaaaaactactttaaagttcatatggaaccaaaaaagagcctgcattgccaagtcaatcctaagccaaaagaataaagctgaaggcatcacactacctgacttcaaactatactacaaggctacagtaaccaaaacagcatggtactggtaccaaaacagagatatagatcaatggaacagaacacagccctcagaaataacaccacacatctacaactacctgatctttgacaaacctgacaaaaacaagaaatggggaaaggattccctatttaataaatggtgctgggaaaactggctagccatatgtagaaagctgaaactggatcccttccttacaccttatacaaaaatcaattcaagatggattaaagtcttacatgttagacctaaaaccataaaaaccctagaagaaaacctaggcaatatcattcaggacataggcatgggcaaggacttcatgtctaagacaccaaaagcaatggcaacaaaagccaaaattgacaaatgggatctaagtaaactaaagagcttctgcacagcaaaagaaactaccatcagagtgaataggcaacctacagaatgggagaaaatttttgcaatctactcatctgacaaagggctaatatctagaatctacaaagaacttaaacaaatttacaagaaaaaaacaaccccatcaaaaagtgggcgaaggatatgaacagacacttctcaaaagaagacatttatgcagccaaaaacacatgaaaaaatgctcatcatcactggccatcagagaaatgccaatcaaaaccacaatgagataccatctcacaccagttagaatggtgatcattaaaaagtcaggaaacaacaggtgctggagaggatgtggagaaataggaacactttcacactgttggtgggactgtaaactagttcaaccattgtggaagtcagtgtggcaatccctcagggatctagaactagaaataccatttgacccagccatcccattactgggtatatgcccaaaggaatacaaatcatgctgttataaagacacatgcacatgtatgtttactgtgacactactcacaatagcaaagacttggaaccaacccaaatgtccaacaatgatagactggattaagaaaatgtggcacatatacaccatggaatactatgcagccataaaaaaggatgagttcatgtcctttgtagagacatggatgaagctggaaaccatcatgctcagcaaactatcacaaggacagaaaaccaaacaccgcatgttctcacacaacaggtgggaattgaacaatgagaacacttggacacaggaaggggaacatcacacaccagggcctgttgtggggttgggggaggtgggagggatagcattaggagatatacctaatataagtgacaagttaatgagtgcagcacatcaacatggcacatgtatacatatgtaacaaacctgcacgttgtgcacatgtaccctagaacttacagtataataaaaaataaaaataaaaataaaaataaaaaaataaagaaataataaaaataaaaagtaaaaaaaatatatatatataattggtttgtgtgtgtgtatatatatgcatacaacactggagcacccagatatatatagcaaatactattagagttaaagagaaagataggccccaatacagtaatacctggagacctcaacaccccactttcagcattggatatatcttccagacagaaaatcaacaaagaaacattggacttaatctgcactacagaccaaacagaactaatgaaattttatggaacagttcatccaatggctacagagcacaaattcttcttctcagcaaatggatcattctcaagggtagaccatatgttaggccacaaaacaagtccttaaaaattgaaaaaaaaaacatgaaattatatcaataatcttctctgaccacaatggaataaaactgacaatcaataacaagaggaaactatacacacatggaaattaaacaaaatgctcctgaatgacccatgggttaataaaaaaaaaaaagaatttaaaaattgcttgaagcaaataatagaaacacaacataccaagacccgtggcctatggtgaaatcagtactaagaggaaagtgtatagcaataagcacctacctaaaaaagtagaaaaacttcaagtaaacaactatattaaagaacaagagaagcaagagaaagcaaaacccaaaatcagtacagtaaaacaaatagtcagagcagaaataaatgaaatagaattttttaaaaaaagaccaatgaaatgaaaagttggttttttaaaaaaagataaacaaaatcaacaaacctttagcaagactaagaaaaaaatatatccaaataaataaaatgagagatgaaaaaggagacattacaactgatactgcagaaattcaaaggatcattaaaggctgctgtgaggaactatatgccaagaagttggaaaatctagaagaaattgataaattccagaaagaaactgtctcaaaaaaataaaataaaatcaagcaggcctgtggtattctgtttcctacttggcgtcttgaaaggaactctgacaaagagagtgcttccaggaaaggcaaccacaatgataatgaaggggtctcaatatcatgctgcagaaaaatatccttagtaacatggcatcctgaaaaaaattaaggcttatgatgggaaagaaatgatgattgtcttcaggtaatatttgtccattttatggaagaggggttagatttgtgccgtgtagttttagagaacaaattaaggatcaatgtacaaaatttattgagtatcatcttagctcaggttcacaataaaaatcttcccagttgagagaaaaagaaaacaagtaccatgcaaaacatctctctcgtggtcctctcttagctcccataagatccaaactccttcataccctcacgcttctgttcattttcatcccatagtactctccatttcttaaacccatacaccttttgcaataatctgaagccctgtttgttttttgaaggttgcctgataattcctttcttattactcactgtgaatgtcacacaattctgtaattgtgtttttcatttcgatattgaattatttaagaataagtaacgtgatttaccttcttaacatatttggatatctatttcataataggcactctataaacacttgatttggaacttaccatactacaaggttgtcctatactgtactatgcttcttgggggcaaggtctttatatctccagctcccagtcaaaggcctaatacatcaagaagtgtttattgagtggatgaataatggtggattttaaaaaaataattgattgaggggaaattcagataacacacaattaaccaaagtgcacttatacattcacagtagcatttagtacattcagtgttgcgcaactgccacctctgtctagttccaaaaagtttccatcactctaaagtaagatcttttacacattgaacagtttctccctattctctgctcctcccagttcctggtattcaacatttgcattttgtctctatgaacttgtctgttctcgttatctcatatgaatgaaatcataccatatatggccttttgtgtctagcttctttcacttagcataatgttttctaggttcatccatattatagcatgtgccagtacttcattcttttatatggctgaataatgcttcattgtgtatatattgtatgtttatctaatgatggacacttggctggtggccaccttttggctactgtgaataatgctattatgaatattctatggttaattttttgagaaactgccaaactgttttttacagtttaatgactgaaccatctcatattcccaacaaggtatgagggttccagttactccacaaactcaccaacacttattgtccatttttcttattatagccatcctagtgagtgtgaagtggtactcctggatggtaggttttaaaacactgtggtgttttgaacaatctttaacatcttcagagatgactttactatgaagctaataaagcttaagcttcagattctttcagtgaaaattctatgttgaaattagaatttataattttctattgtttttctttaaaagagacataaaaattatataagttcctggcactacaaaacttgaattttccctgcatacaagcaaatacaaatatctagtgttcatgagtataaaagcaatatacctttctccagctgtggtactgtgatctcttacttccaatgtcaccatagtcacacttaaagcctttatgacaagtaccttatcacctgagtcaaaagtttaagaacctagtaccacagatagcacggtaggaaccatagtaatcccagcctcttatcaatgcagaacaccctgtatttaggttactgctagaaagccaagtacagatttcagtttccaaaaggattcttacacagttttgctttcaattatctcttcttctcaaatatcaaattaaaaagaacagatccatagggtgtctgcaatactttaaggatgtaatatcttttacactgcttttgcagtttgcttgtagccaataggatgattctgtcacattcactaagagaaatcaagttgcaaatgcaaatttatatgactgttgatgtcctcaatttatataaaaatctgtgatgcacatcccagatctgtactgactacaaatagatcgaacggtgagctccattaaccatgcccatatgatttatgagtaagttttacagctatgtgctgttatgcccttcagaaactaggctatttgaattgaatattcagtgtaatacagtatgtgacagaccatacaaattatttgcacaagacatggtaagtaatttggaccgtaaaatttgatgacaatgttcatcaggagagtagcctacctctctgaatagccttagaaatttatgttatagtaccatatggtgttcttcttttctacattttcctcttgaagattcaaagtgttttcccatggtttattattaatacattattctcctctgtaaaatattagtttactttacatatatgcaaactaagtttgtgtcattcagtttaaatattaaaaaattcaccttctggcacatactgctaacataaaaccctaataactatattcttatttagttgtgttccatgtattctaaatgttctccattttttaaggagaagatattcattataagactagttctgcctcttaaaatcaaaatactgactatttaaagctcaataaacattgagttctaattattttcacttctctcttctgttagctcagtcataatttgtttctaaccttctatcacctatctgcatatatgacttttcagtaagatagactgggctttagttcattcatctgaaaggaacctaataaagccactgagttttgcgagaatcgttagtgatatagacacagctagcattccagaaaactcaggactttttacccttctctcaagagaagagaaaggatgtttaagctttgtgggggaggaagtgtggctcttgccaacattttacaatataaaattgcaagactcctcttatgaaacaatgtttctcaaacgtcgacgtgcatataaattaactgaggagcttgtgaaaacgcagattctgattcaataggcctaggaaggggcccagacaagtgctcaggggatgccaatgtgacaggtctgtggaccactctgagtgacaaggttatagaactccaggttctgcataagtaggtatgctcagcataactaagcaaacagcctgccctcaggttagtgaggccttttttatgaattaaaaatttaatttggggatagatttgcatgcagttgtaagaaataatacagaaatatcccatataccctttacccagtttccccaattgtaacatcttgcaaaactatagtacaataatctcacaaccaggatattgaaaatgataattcacaaccaggatgttgacaatgataatccactgatcttattcatatttctccagttttacttgtactcatccatgcgtgtgtgtttgtgtatggcatatttagttttgtgcaattttattacatgtgcaagctcatgtatccccccaccacagtcaaaatacaaaattccatgctgcaaagatccctcatgttgcactgttataaccacaccaaaacctgatccttgacaatcgctattctccatctctacaattttgttatttcaaaaatgtcatataaattgaatcacacagtacatagtctttagagattggcttttaatcaatataattctccagagatctttctaaattgtgtgtgcatcaagagtttattcctttttttttttttttggcttaagtattccatgacatgaacttaccacagtttaaccattcacttattgaaagacatccaggttacttccagtttggggctattacaaataaatctatgaatatgtgtgcacaagtttttgtgaaaacacaaagtttttatttctccaggataaatacccaggagtacaattataggggtcatatgataattgcatgtttagctttataagaaactgtcaaactgttttccagagtgactgcatcattttacattccaagcagcagtgtatgagtgatccagtttcttcccaggcttgccagcatttggtgttgtcactatttttattttagccattctgatagatgtgtagttatagctcattgtggttataatttgcatttcccaatagctaatgatgcgagacaccttttcatttacttatttgccatctgcatatcatcttccgtgaaatgtctgttcatgtgttttacccacttcataattagattgttttggtattttgctgttgaattttgagaattctttatatcctagatactagacctttgtcagataggtagtctgtgaatattttctcccactctgcagcttgtagcttgccttttcatgcttttaacatgacaatatctttcacaaagcaaaagtttcccattttgatcaagtgcaatctgattgatttttgctttcatggactgtatttttagtgtccaacttaagaactctttgccagccatagatccagaacttctccctattgttttctaaaacatatagttttatgttctccacttaagtccatgatccattttgagttaattttttgtataaggtgtaggtttaggttgaagttcacttttcttgcctatggccgtccagttgctccagcaccatttgttgaaaaggctatcttttctcctttgaattgctcttgcacctttgtcaaaaatcacttggtagctttttaatggtacatgaatatcctgcaggtctgtccctagcagtagataaccaatcaagacttagggcagtgacctagtcagtataaatgtcttcatgaaaatataattccttaaaaaagaaaagttattaccatctgtttgcatcttaaggaatgtttcaatgtacagtcagactaccagtacagttctcttgctgagtttcagcagttatcagcaatttgtttaatttcaccttagtcttttttgttaacctacttctaatagacatttccattatccttcatttagtggtttgaaggtcaaaaatcatttaaatttcacccacatacccagccacctgcttggatatgcttagtttggctctttagtgcattcagaccaactcagtgtatcttcctgggtttttgtttagaagaagaaaaagaaccagacattaatttggcactcagagtatctcttaactatatgcactgcactctcctttatttcaacatcaaactgaatattcattctccattctttccttattaggtgctgttaattctttacctgaaataaaaataatgtctctatctatactttcagagaaaaaagctgtgtaaatattttccagtcaaggaagtataatcctgataaccatttactacccagtcactcttaaagaagaatctgcccaagaattttcccaggcaggcactgaacctcctaatttctaagtggtcaaaaactgggagcctggtgctccagggctctaacagctgacctcaaccacacacaggtcaccagagtttagaactctgtcttacagtcctgaatcccaatgtgcagaagcaggaccttactccacatttctgtttattggcaccctgacttcttcccccttccctactctgatttccttctgtctgtgctctttctggtttctctaagcctcacatgcgattttgcattattgactcggacgttcttggtttccctctttctacaaatgtcctccgtttgcatttagaggattgaattgttttgaatggaacccctcccttccaggagctctccacacatctctcctggcatcgctatgaaagaagccaatctctgcatcatgtacttctgctttcatctccagaccccagccacacatcctgctatcgaggcaatgacaaatcaacctcagaaacactgatatttgttttggggagttgaagtacttctacaatccccctgtcaaactggcctcttgctatcccctgtttcattcccaatttactcatagctggagaagttgctgacctaattggtcagaagccaagatattcatccacccctctttagtagtggttgggattgcttcacctcaaaggcaggaaatcaggacttatttttctctaggtgtttccttctgtcatgcagtaagtccatctgggcatgaattacttcttagaggaagtcctcactcaagatcagtaggtgggtaagtaggcccacagcccgacctgtggaaatagcatatgtctcttcagcatgtggttccaaaatttagattcagggaaaggtcagcagatctactttagcctcaaggcctatactaaatatctcaataaaacttttacagagctctgcatgctacaccaagaaaaatttcaactccttcatttgctttttctttttaaacatttttaccttttacatgatattcctagtgtaaaaggaagaagccaccactgaatagctgacacaaaaatggaatttgctgctttcttagcaaggaagagttgtgcttggaaggtgaagtcttcctgagaaaagcaaagagataatcttatctagggtttggcaatatggagttcaaagaaaatttattttccctgggaaattttgagacattgctccattagcttctagtgttcagtgttgtcaatgagaaatctgaagccaatctaatgtttttataaggttgttgtttttttccatctcttgaagcttttagaatttttctttttaattttagtgttctgagatttctgacagtgtgccaggtttgagttttctcttattcatttcactcaccgctggtgacctctttgaatctgaagacttgtacatttcttcagctctgcagaatgtttccctacagtttctttgactgatttatcttctctttttcctctgttctctcctttgggaatttatacaggtgttgtaacttctagatctattctccatatgcttttcttacctgatgtaacttcagtcctgtcttactttccttgtgtacttttacacctgttgtcctgtgctacactctgggagaattcttcaactcattctctcctctgttgtgttcattcggcagtttagctaatctcaaatctttttttgttgtttatttttgttttttggataatcaaattttttctcttcacgtctcttatctattccctttcgcaataatctatcccaatcaacatataatagatatactttcctacctttatgaagatatcaagctttttaaaaatatcatcagctttgttattctgtttctttagatactggggtttttaaatttgttttcttcagtgcttctcatagtagtgattttgtgcaatcgcttggtaatttggtgtttgtgtgatcatctttgtacttgatattgcccctgtaacttgtgtatatctgtagtggacacagagcaaagcgtaggagccgtttaccttggggatagaagcattttatcagtgtttttaagaagtattagcacatggtgataataaaaatcaaaccaacttttagttgttttaggagttcttttaaacttcctacagacaatgtcccccatttattgcctacacctggggaagatgagtcccacaacctcctctcactccacctcccctcctcaccccacaacttggtacgccattgctgtaaatgatgttcacttgaccgtattctttctacactatgagggaaaaccactgtcaagagtagtataagaccaactcactgtctgggcatagagtcccccattccttttgattgttgccatcctgctaagatacagctctgcttctctagtccaaattccctctcaccacctagaggaaaatgcttctgcacttatcaactgaatgcaggtttggtcaaaaagagagcaacctacttcattactctgaatgcaattggtgtggaatcaccccaatggttgaccatggccccttctggtcccttgtattcacttcctccaagggtaaaactctctcagaaccctctcactttgcaatgaacgtctcctgtgactgttttgaatgatggtttttttcattaacatcaacactgttctgagcactttacaactgtgagcattaaatgagctaacatatgaacccatatgctttctaactttcagaaatgtctcaaattttctggcttactggtggcaatgtcttgctttccagcattgtagagttttcacaacatttttttctgtcatctcgggatgtatggcatttggcctaatatcttgatctaatttttcacctgcttcttaaaatagatttaccccttttttcttgatatgtatgtattccaggttagtccacttgagcttccataatgaaataccactgactgaaatatcacaggcttaacaaacagaaatgtattttctcacagttctggaggctaggagtccaagatcaaggtgctgtcagactcggttctggtgaagccgcctctcttcctcgtagatggatagtagatggctgccttcttgctgtatttccatatggactttccgctgtgaatgagatgaaagaaagtgctctttagtccctcttctttttcttataaggacaccaatcctggccagacgcggtggctcatgcctgtaatcccaacaattttggaggccaaggtgggcggatcacctgaggttaggagttcaagaccagcctggccaacatggcaaatctccatctctactaaaaatacaaaaattagccaggcatggtggtgggcaactgtaatcccagctacttgggaagctgagacaggagaattgctcgaatccaggaggcaaaggttgcagtgagccaagattgtgccactgcactccagcctgggtgacagagcaagactccttttcaaaaaaaaagaaaaagaaaaagaaagaaagaaagaaaaaggacaccaatcctatcaatcctatcagattagggccttatccttatgacttcatataaccttaattcctccccataggtcgtgtctccaaattcagtcacattaggggttaggactacaacatatgaattttgggggaacaaaatttagcccataacacattctaatgaaacacgttttaaataaagaaaacatcaataaacaaactaataaggaagagtataaactaacaaataaataaactaataaatgtaagagtgtgtgtaaaatgaaagagaggaatgttaactaaaaaatcttcaaagtgaatacagaatatgatgagctttcctggtgcaaaataagtgcacaataaatattagttgaataaatgaatgagatgttcaaaatgcacctcataacttccccaagacaccaattttcaggaacattgtatcaaacattctttgactctttcaggctgctactccacagagaaaaaatggtaaaagcagggtcaccctacttgttaattttctactcccaaaaaaatacctgaagccattgaggaattttaaatgtttactgaaattaaatatattagtattatgactatgtttatgctgatatgtttattcattctttttccaattgcatttagattttggaagggttgccattggttatgtgtgttgatttttgtgtatataggcaggtgtgtgtacatatgggtgtataatataaattcacaatctatgaaattttttttgttgttactttagccttaaaatggttgactaactttaaacagggttaggtaccattacatttttgggacaatagaatatgattcactagtaacaaaaataaacaacagagacatacctccagcacttccagattaactaaagaaatgctctagagagtagacggctaacatggggtgtggaaacaagtgttggaaccatacatgcattgcagcatattctacacagatcatgaatcacttaggttaggaaattgtgcatcataacatccatatgtacattaccatatgtacaaactgatgtgtgcaaacaataccataatgcacaagtgaaatgtgataaacaactcaaaatcttcacagcatttagaggtgaatgtgaaaagggagtgaagtgagacttggttgagttatatctatactttcccaaatttgcctaaaatgtataggctttatggtagactgccacatactttggcaaaaaatcataattttgtgctattttcactcagaaatgtattctcaccaaaaatactcatgtatgtaaagtgagattttttttcagatgtaacttttgagggcagctgtatgaatttatcattaattattgcctaaacatggcaaaagaaaaaggacgtgctcctttctcccctaaaaacttcccaaattagaatacaatactcttcgcctaattcctgcctgttattcaacaagatagaaatagtgggttttaaaaaaattgaaccaactgggatttttgagaaataagtcgctgaaaaatgaattaattcttaattaagaattaaaaggaatctagcaaagtttgcaaaagaaaataatgaacagaaattcaaaatactatttagagaacaaacacaagagtctacatacctgtttcacaaaatacttgttaagacaaatggggagaaaatgacaaaatttgatggcattacatatctccctaaccaatgttcttaaagatgaccagtgaactcttacttgcccccatcctactcactttatgtgcagcataagatgccactgacttcctttttcaaactcttaccttccctgattttttgtggcatttttctcttttagatctgtctctctaattgctacttctcagttccttttcttatgctatgccgtaaatgtcagtaaattccaaggttgtgacttcccaatttttcttgttctatgcaggcttttactggtaatctcatccactatatcattcccaccacatcctctagacaggtgatttcaacctagttcaatatctaccacgcagtcctcccttccgatttccagacctaaattctcaactgctttctgtaccaaatgtattgaaagagaccttgattcttaacttacgactcaagtttcacatttactaaactgaatgtattgctatttctcttacaacttatgcttccatatgagttgtccatatgttatcataattatctgctttgctaactctgttagtttcctaagactgccataacaaattaccacaaactgggtggcttaaaacaacagatatttattttctcgcagttctggaggctagaagcctgaattcaaggttggtccttttgaaagagctgagggagaattttttccatgctctctctcccagcttttggtgatcaccaacaatcctttgtgttttctgacttagcaatgtagtgctccaatttctgccactgttgtcacatggcattctccttgcgtctcttctctgtcttcaactaggcttttttaaaaaaaattcatactgttctgatttattcatcatcagtgtacctgagagactcggcagacataaattaactatatgtaaattactatattcatgagcagatgcaaaaataggaaaggcagcgttactggcttgtagttgataggccactccagcacttaggcttcttataaagaccccagtcactggattgagggcccaacctactccggtatggcttcatcttaacttaaatagttaaatctataaagactcgattttaaaataaggtcacattctgaggttccaggtggacacaaatgttggcagaatattattcaatgtagtacaatgaccaaacatggaattccatactctgacattaacctacatattttaagttgattatctcccttcttcaagtcacacttcctccttactgcaactaattatcttctttcttttttaattattcttccaaagcatagctaatcatgtccctcttctgcttagaattctgccatggttccccatcaacctcaactgaccattcaagacaaattttaggtcacttgggatcttacgttaaaatgtttgagcctttattgtattctattaggcagcgatgaacaccccttttctaaagctgtttcctttgccttgaataccttccctttatattatcaaagtgctgtccatccttcatgattcaactaggaaaccacctctgctgtaaactcaccgcagatcaccacccactcatgttaccatgctcatcaaaattagtcatctctccatgttatactaaagcagccatcttaaactagagaatatgttatccctgcgtgcacgtcaaaactttcttagagtcctaacaaacacagttttaaaagaaccaatttcaagatccacgtcttataaatgttctctttcttaaaactaataatattgagtgcagctgcagaccaggtgtttttctttcctatcttccttttcacagtggacttccccgcaaccccaccactttaccccaaacaacaaaaaacttaactcgcctcacccattccaatcttactagcattgccctagagggtaaaaacttctgtaatcctaattgttaattatacaattttgttggcctgtgcctctgactgaatttaaagaaataaggaaactactatagttcttttctttttcatcagctttttaaaaaatgagtttcccttgtacctttatcaaaaaaagtcacaaattttattctaacaataaccaatcctttattctttcatagagatatataaataaaattttaggccatcttttgtgactgacatctgcaatcccagtactttgggaggctgaggcaggagctcctacttaaagaccagcctgggcaacaaagcaagaccccatctctagaaaaaataaataaattagcaaggcatgatggcacacaccttttgccagctacacaggaggctgaggtgggaagattgcttgagctcaggagtttatggcctcagtaagctatgatggtgacagagtgagaccccatctctagaacagaacaaaatagaatagaataggaagacaactatccaatatgagtttcctcctatgtttatcaaaatttgtagaattggctggggacagtggctcacaacagtaatcccagtactttgggaggccaaggcaggaagattgcttgagcccaggagtttgagaccagcttgagcaacctggtgaaacctcatgtctacagactcacacacaaaagaaatgccggcactctgggaggccgaagaaggtggatcacatgaggtcaggagttctagaccaacctagccaacatgatgaaaccctgtgtctaatttaaaaaatacaaaaattagccaggtgtggtggtggacacttgtaaccccagctactcgggaggctgaggcagcagaattgcttgaacctggaaggcagaggttgcagtgagccgagattgcaccactgctttccagcctgggtgacagagcaagaccctgtctcaacaacaacaacaacaacaacaacaacaacaacaaaaagagagaaagaaagaaatattagacaggtgtggtgttgcacacctgtagtcccagcaacccaagagactgaggtgggaggatggcttgagcccagggaagtcaaggctgcagtgagctatgattgtaccactgcactccagcctgggcagcagagcaagaccctatctcacacacacacacaaaagttaaattgtaagatatttttactgtttaccaaaactttcatcatggaattaggaataattctttaaaaagcataaaattggtaatataaacaagaaatagcaaacagagctcagatgaagcatagttacataaggcaaaaccattggttctttcttttatcccttttgggttttatctcatgatgtatgtttcttcctctctatttgcctttcctgttccataacaaaattacctaaagaaaaatacattcatggcttccatatgtatataggcagaggagaatggcaaggatcctagaaaagaagctggagaaagacaagaagatgaaataaaatgacatcataatgctccagctaacataaagacaaaaatgcatagtagttaaaatatagatatgtatttgatatgcttgcattctttttcatgtgaatttcagcattttaaccatgaggtgggtttgcacactacaaagtaatataactaaatggcaattatatggtcaattagggcttatagataattcagggaaagaaaaaatattctcctcagatcttgggacactggagagtttgacagtttgaatacctgactttatagttaatgattcagcaacattcaacatagctttttatatatattttaaagcactcaggcacatcaactaaggtcaaacaaattgttaaaagtagtgggtgtatttactcaataagcatttattaaaacctacgttgtgctgatcttatggagtatgaagaaaagacacagttccttgctttgagaatcttacagtctatgatggtgttatacacataaatcacttcaaatattccataatcactgatgaaccccaagttcttattgtcagaactgtatttctgaatgtctcctgaatatcacagacaaggttttatcacacaaggtcctacaaacacctcaaactgaagatacacacacaaaaaattttttcatgccgctacttcatacaaacatctgcttcctgaattcctatttatattgatgtcatcttcatgagtctagtctcttgtaatagaaacttagtcattcttgatttcttctttgaattatccaaaagctccagtacagctcattagcctatcctctcactattgctaattttccaaagttcaaagctgtctgctcaggcctttcgtctgcttaataccctgcattggctctctttgcccactgcttaatgtctaaactcctcaatagatcacatgggaccatcataacctgacttcactcacctttcctttccatacccaaccaccatcactcctgccaccctctgccacctggccccctacacacacacacatatactctgttccaatcacaccaaaatctgctgaacatgccatgttctttcatgcctttgaacatatcactctccatgcctaaaagacagtctatcatttatctgtcaaagatatgctggtcccttaagacagtgtacttcctctacaaagcccctccttgacaccccaggctaaattcagtgtggagcaaagtactttgcacatgtttttattatttaccattagctatggattgacatccttgtttcccccattaaactatgaacaactatcgggcctgacactgtgtaacttatatttctatttgcagtacataaagtagaaactcaataactgcttgatggatgaataaacttctaagcacacctttaagaaggaatcagtgaaattatatctatgacaacaagtcttaatcaggaaaaaagttattctggctttatggacctagtgtccacctatttctgaactgttgaagatgaatctgaactatgttcactgcccgttggtctctaccatccttaagtaggcttttatatgtcctaatgtgacatacttggagatcttgattctgagacaggaccgtttacctttgaaagaagtataaattgtaccatgataataagaaggtaagagagaaaaacatgggtagtctgggaacctgtaaacatttatagatgtaatatatctgtgggccatgtagggaaggggttcatggagaggggctcatactcaatactgagattttcttaagtggaatctacaagttgcccagatgcgctgtgaaccccatgggctgccacttggaggtgagatgggaagggcagatatgagaagagtatggatggagcctacatgggctcatgtagacccaatgtcagacattggaaggaagatagacagtgagagctctgagggaaatctgtgaagaagctcaggtcttgatgaagtatcctaatgtctactctatgctccatgctaggctgtttgtgtattttctcagaaaggaagttcattggctggggacggaggctcaagcctgtaatcctagcactttgggaggccagggcaggcaaaccacctgaggtcaggagttcgagaccagcctggccaacatggtgagacccagtctctactaaaactacaaaaattagctaggcgtggtggcatgcacctgtagtcctagctacttgggaggctgcggcatgagaattgcttgaacctgggaggcagagattgcagtgagccaagatcacaccactgcactccagcctgggcgacaacgtgagactcagtccaaacaaacaaacaaaaaatcaaaaggaagttcattgaagcacagcagctgcattatttttctattgccacataacaaattaccacatacttaagtgatttaaaacaacacccaaaaataaaagttgaagatataacaaataaataaaattaaattaaaaaccacccagctattagcaaatgggtccaaatcagaagtctgagtgggctcaaccgggttcttggcttcaggtctcacaaggctgaaatcaaggtgttggccaggccagactaggctctcactgggaggctgtggtgaagaatttacttccaagttcattcaggttattggcaaaatcagttcccgcagttgtacctctgaagtctctgttttcttgtgaacagctagccaggaatcactctcagcctcctagaggcctcatgaaattctaaccaggtgaccctcttcttcacgatcagccatggaggatttatctcaagtaaaatctcccttgtacttcaaatctctgccttcttgctgtgtcagcagctggagaaactctacttttaaaggcctggtatgattagatcaggcccacctatataatctccttatcaactgtgccacataacatggactactgatgggaataaaaccaccatacttattgtccctgggattatgcaggcacatataccaaggggcagggaatcttggggccatcttaggcttctgcctgccccaccatctgtagctttacttgtcctagtgatacaatgtaataacagaatcactgtcatcaagatccaatatggtcaagagttaccacttgctatttgaggattctaatttttttaataacaaatctgtattccaccagcactatttccattaaacctaatgtttgaattgtgctattcaattgcaaaaaaggggaagttaataatcttgaatatataaggaaggtgaaaagatttaatctttcccttatatctatttcttcatgggcccatctctattgccattttttttctcatttagcccacaaaacaaaccgcctgcagctcctgttataaatgagtatgccgatgcccagctacacaacctggtgaaaagaatgcgtcaaagaacagccctctacaagaaaaagttggtagagggagatctctcctcacccgaagccagcccacaaactggtaagcattgctccctccaagtactgggaagaaagaagtgctgaggggacctgtgttttgcagatgttttagtttggatctcccaaaagcagaccctgagaaaatgatttacgtacagtttattttgagagtaatccaggaaggtacgagtggtgagacagagaacaaagttaagacagtacagatgggttaataagaggattactggcggggtgcagtggctcacacctggcagggtgcagtggctcacatctataatcccagcactttgggagaccaagacaggaggattgcttgagcctaggaatttgaaaccagcctgggcagcatagtgaggccctatctcttttttttaattaaaaaaaagaaaaagaataagaggactactgctctgccattggggctttatccagctgaaaaactgtgtggctcatacttgaaaattacttgaatggaagaggaggaaactggttggtgctggagcctgatactgttacctccccagcactttcagtaaacctgctagaggaaatcctccgacagatgcagggaagcctcctacaggtgacctccaggctcaggatatatgtgtaggacacaaacagtatcttctataacaaattttattgtaaatatttaaaatacccatgttatgcaaagtacatattataaaaacacaggaatattacctgggtatccaagagagcaaaggacatcaacaaaccaatcaagtaaggggagggactattatcaaccacgctaataactacaaaaatgtgtgtatgaaaaattaattggccaggcgtagtggctcatgactgtaatcctagccctttgggaggccgaggcaggcagatcacgaggtcaggagatcaagaccatcctggccaacatggtgaaaccctgtctctactaaaatacaaaaaatcagaaaggcatggtggcacatgcctgtagtaccagctacttgggaggtgaggcaggggaatcgcttgaacccaggaggcagaggttgcagtgagccaagattgcgccactgcactccagcctggcaacagagcaagactccgaaaaaaaaaaaatcaatatgataatatagagcacaaaagtaatacatactgtgattacatctatgtaaaatatttatatatatacaggaaaagaatagaacaaagctttgttgtttaacatataaatgcaaatcaagttgataattacatgggatggagttgagattccttgtagttctgtataagagaatgtgggttttcaaaataaactgtgtattgtataacagtttctttttaaacagaagaggctaaaagaaatcatagttattatacttcgataaagatatattgaaaagaatattgtgtgtgacatgtgtgagggtaaagaagcaccaaaccaaaacctgtggaatgatgtacgtttgcagtgtttcggatctctggctttattaatgctccaaagtatgtgaaaatcaagcttgtatttaaaatactctatttgtaacacctttgtgacaccttatttgtgagctttaaacctgttacatatttccaaatttcagtgttttcattacctgtatattttcataaatgttactattttattttgtttttattgtatactttaagatatacaacatgatttgttttcttttttaatgtgagaatgtctttattttatacgctacatttttatttgagacagtttaaaaactgtaaaatccacaaatattaagtgtacagctcaattattttaacatattcttttttcattttttaaaatttatttcctgtaatattggagttacaatgagcttttaaagcaaattccagacactatatttcatccataaatatttcagtgtagacaaacattttatttatatatttatttaatcttattttattcttttaatggcagggtcttgctctgtcacccaggctggagtgcagtggcacagtcatagctgactgccgcctctaactcttgggcttaaatgatcctcttgcctcagccttcagaggagctgggactacaggcgtgcaccaccatgcctggataatttttacacatgaatagtcttgttgcatcaccatcaccaccctccaagataaaggacatttccctcactagagaaaacttccggtctacccaggtgacaaagcccccttgccaaggtaaacactatcctgaattttgtcatcatttagtagtttttcctgttctttttttttttttgtaaaaatttattaacatttatttattttaaaaattgtttttcctttaattttttacattgacgtattttttctttatacaaacacacacacagtgaaataaatgtcactattttaaatgtcatgaaggttttgtttcatctgtctgtatcaaaagaggaagattcataaacgttccgactttaagaaattcaagttttttggatttttttatactttaagttctgggatacatgtgcagaacatgcaggtttgttacataggtatacatgggctatggtggtttgctgcacccatcatcccatcatctacattaggtatttttcctaatgttatccctccccttgtcccccaccccccgatagaccccagtgtgtgatgttcccctccctgtgcccatatgttctcattgttcaactcccacttatgagtgagaacatgcggtgtttggttaagaaattcaagtttttaactaaactaacttaacctcttcaaatgtttcatctttttttttttccctatgaagcaaagcccacggctgtaccaccagtaaaagaaagcgatgataagccaacagaacattactacaggctgttgtggttcaaagtcaaaaagatgcctttaacagagtacttaaagcgaattaaacttccaaacagcatagattcatacacaggtattatcaaagggtgaattatcatagtgggagggctggctatcaccaagaaaccctgtgactcaaagtcacagatagcttctattttccttacttcatattctcaatctaactaggaagcagaatttaaattaaataacctgcaaaggatcatttgcccatctttggtgaagacaagaaatacaatattcctgcctatatttaaaaggcagtccagatcctctcctgcccctaattacctttgaaaagaaggcccaaagcactccgcaatatgtgcactgacacactcacacatcattataaagtgtcagtcttcttccatggcttcacattgttgattattctaattgaacaaatcctttcctgcagcctcccagaggcagagaagggctatgtgtgaagggacatggactactttaatgggctgaccctctgccctcccattcagtgccatactccttctggcaggatgtggcctttctgccacctgccctgggcaatcaatcctgcaacttaactactgaggaactaaagatctgtggctgcagtgatgtctgtgcaaagtccttccaacttttcttgaaattctcgttgcctgatccaaatagtacagctacctgtgtggacagactcagaggggccacttcttaaggagactggaaggaaactctccactttcggaagaggtgataagatcatttaacatctcttgtaaagcccggagcctcacagtccagaggcagaatggtgttgaatgtttaatagagcctcctatggcaaattactctgtagagggtagtgccccaacctccccaaactaagcaacagaattctttctgtgtttgttctatgtcatttggatttcaccacttgctgtttttccagatcgactctatctcctgtggctcttgcttgtcactcttgcctataactggaactgctgttttataccactgcgcctcgtcttcccatatcaaaccgcagacaacatacactactggcttattgcggacatcatatgtgatatcatctacctttatgatatgctatttatccagcccagactccagtttgtaagaggaggagacataatagtaagtggggttcgggaaaggcagaaactgaaacgtgaataacatctaattgggctacaaaaagtaacagcattgttttatttaatgtttgactggctatctgcatggataattgcaagaagtcatgagcaataataacaagaaaacaattataaaacagccattgagtgttcacaatgtgctggagaacatgcatctccctgtaccttagtttcctcatatttaaagtgaaaataacaaaaacaccatcataatattgatggaaagattaaataagttgaggcctgtgaagtgcctagattgtgtctggtgcctagtgaatgagtattaaatgtcagctagcattattgttctagttaacttatttataatacttcccttaatcctttcaatgacactatgaaaaagatgtaattagccccatttacaaatgaggaaactgaggtttagagagggaggttatttgctcaaagcccaaagctggatagtagctgagccaggatcctaacccaggccttgcctctacaatcacgcaggttcaggttagcaagtgtttcagaatttgacaatacttgagcctacaaagagagtgccaagtctgaaatgttgaaactatccacatattttacctaaataatgttttttaaatagatcaattatcaataccaaaagaagaaaccatttaatatatagtcctctggtaatcaagcctcaaacagtctgtgaagcagttgttttctatcacattacagtctaccgttcacttcaatacttttaaaaataagataggtattatttcactcattagaacctactcaaccttcttaggagacagcctggtgttgtgagaaagtactaggctgtaatattttaggacacggactgtgccttgtttatctttgtgtagtaggaaccaagtgaagtgcctccatgtagtagagaaatcaagcacagggttttaggcctggacactttgggaaaacctaacttacaaagcaaagctttcatgacccttttttttccccaatttttattttatattcaggagatacacatacaggtttgttacctgggtatcttgggtgatgctgaggtttggggtacgattggcccaggtactggacatagtacccaataattaggttttctgccctcccccacttcctccctgcattcctcctccctctagtcatccccagtttctattgttctgatctttatgtccataagtatccaatgtttcacttataagtgaaaacatgctgtatttgtttttctgttcctgcattaatttgcttaagataagggcctccagctgcatccatgttcctgcaaaggacatgatctcgttccatggtgtatatgtgccacattctctttattcagtcccactgttagtgggtacttagaatgatttcatgtctttgctattgtgaataatgctgcgatgaacatgcaggtgcatgtgtctttttgttagaaagatttgtcttcttttggatatatacccagtaatgggattgctgggtcaaatggtaggtctgttttaagttttttgagaaatctccaagttgatttccacagtggctgaactaatttaccctcctaccaacagtttataagtgctcccttttctctgcagcctttgccagcatcagctgttttttgactttttagtaatagccattctgacttgtatgagatggtatctcattgtggttttgatttgcattcctctgatgattagtgatgtggagcattttttcacttgttttttggctattatatggtcatgaccattttaatcaatatagattcaccgcactgtccaatatggtgaccgctaggcaaatatgtccattcaaatttaaatttgaattagttacaattaaataccattaaacattcaggtttctcagccacattgttcatattctcagaactcaacaaccatgtgtctggtggacagcacagaagatttccaccattgcaaaatatactattattcagtgtggtaagagaatgaaagagcaatgagccatccatatctccatcaatacagccaaaccacagagaggtagccacacccctcacagatatgggcaaatcacaagtacgtagaacacctccactggtgttttgttttttaatgaatatggcatctacaggtctatctttttattctttacttgccaaattcatcacatcctatttctcatgatcaaatgcagtgcccttcctaagaaattagcattcttacccttaggagaaattatcttctcctggatttattctcagtgttgagggaagtttattgtcaatccaatcaatctaagaaacagaaaaatgtgttttcacaagcacaaacccaagtcttataaccactaccccaagccccttccccagctaactagaaggaagctacctttccaactgtggccaatgtgccatcctcctcccaaggctcagcaagggctgcacagaacatgtcctccaatatcacaataggaagagcagactgactgcctatatggcatcttaggtccatgtagaattttgaagaagacagttaggtcgcttaatctccttaatattttctgttgaatcttcagaaggtcttaaattatcaaaaagctgaaaggaatagctttgaatatttttttcttccttaaaataattgtcattttctgggaagtgttttctatatttgaaatctttcctagaaagaaatactaaaggcaaaagccaaagctatgccaaaagtctattcaaaaaattccttgtgcagactttatagcattagttaaatcaccagcaccatccccagagcaacctggcagcttgatgaatggtgatgacggtgtacaaataagaagtaaacaacaacaaaaggaacactaatttcaacctccattagactcacaaggggggagaaaatcaatgtttgacaaatggaaaatgacaaaatcagtaaagggagacttttattttcaattttctaagaggcttttgcacacaatgaagtgttaaaaccaagaaaaataaccggtaaaaaacacactcaacaggctctatttaaaatgcattatcataagctacaaatatagagcaggaaataattgctttgtttgttcaaaagaagtttaatggtttctttaatttagagtaagtagctgcagcctttgaaacttgattacattttggtaagaagactatgcacattgagtacccaacctgaaggtctcatatttagctatccatgctaccattggtaacaccactgaatcattcattcaagagacatttattaaatacttacagttgctaggtagatacatctacttaatttattaaataaatgcaccataactggaggatggaaatatgaattccccaaggccttgaaggaaaataagcaagtaacagacaacagattgaggtgctaacagctacaatagaaaccaggaggccttacaagtttttcacagcatttatttataaaatcttgctcctaaaagtggtgctacaaagataacagaattttgaaacgcagtcaaacaaaaagtctcttgtatgtaatttcctttatagatagcagaaattgagttggaaatgacagtgaagattatttagataagagacactcacatgcacagccctttgctaaacctaccaatcacaaaattcacagaaatcctcagtgtcatctagttacaatgtcaattaggccttcctttataatcaactgcttttggtacttaatcctctcaattgctctttataaaccaatctgaagaaaaccactcccttctctgtgtttcctacactttactcataattctgttatttaattgtgttaaatatcgattaggctaattatgaagtagtagaaaccaacagtctggggtcaaatttcacttctgaaatttgctaatagcattaacttgaagaaactaaacttacccttttattgaatacaatctttttcatcccccaaaatgggaatagtcgtactgttgcaggacttttccttagttcagctaaagacagggtccttggctctcccatggccatgaaaatttaggctcggagacggtttgaagggtgactgaagcagggctttattgtgtgaaaaggtttaaaaaggggggaaacagggatcctccacaaggtcagagccccctgctagagtgcttgtgcccactgttcgaattccaggttccacacaggaagaggagggaccaggctcctccctactgcaaatgtagcaaactttccaaggctccacctcagtgggcaggctggttggagtttctccagcaaccccctcccacctggctatcgcagtacccacctcataaacctattatgaagattgaataagacacctagctcagggtctggcatatagaaaatacacaattgattgtcaaatgaattaaatgaatggttgtccacacacttcacttttccctcttgtctcctatttgtctatgtatctctctttcttacctgaggataagtttcttgagagtagggacagtattcgattcacttatttatctaccctaggaacttagagtatactcaagaaatgtttgaaggagtgaatgaatgataatctcagttcgaggattttatttctttgaataattatttaatctgcattataattgtttcaggtaatattattttaaaatacttcttccatctgtcctgtgtaaaattatgaagtttctgtgaattgtttatcagaaggagtgaatacgggttgcggtgtgcggcttggcgcaggctcacaaagagctgcagtggcgccccatgctcagctttgcggactgagttggcggcggcggcacggggacagcagcgcaccctcgcagccctgcacctgggccagtctcctgaatatttacacattgccgaatctcctgtggacaagacaccacggaggccaggactgttccatgatgggttgagcctcttctcgtgcctagagattccaagaatcctatccatctttttcaccaatatggtttgtggactgtgatgacccaaatctgacatcagttctggaacgtccagaagatactgagaacaacaattaccttcgtcagcaattgaagtggttgatatgtgaactctgcagattatataaccttcctaagcacctggatgtttgagatgctagatcaaccactacccatgggtcagaatgggaaaatagaagtgacttcagaagaagaggaagaagagatggctggagatataaaatacttaaatcactgtaagatgaagaaagaagaacttattagtgggaaaaagttggaggatgaaggaattgaaaaagaaaatttggcaacattagagaaaattaggaagactcaaagtcaaggccatttaaatgtgatgtggtgtttgggtcagtgcaagtttcagatggacttatgaaagagctcagggacgtatgcagatcatggagttataaaacataaaacaggtctgctggaatttttttgtcctcttcctgatagagaattaactcttacatgatttttatcttctggcaaaagcaaagcaatattgcttgaaaaggatttattcagtggaactcgtaaatgacagtacatgactggcatgttaaactgcagaaggtcgaccctgatagtcttttgcacaatgatcttcagatcaaaaaagaaaaagaaagcatagaatatattttgtttaacatgtcttttaagaaactgttgtggttgtcaactgggttgtcgtcctaaagtatgaatctgttatatattaactgaagttgctaatggctacatttttactgactcatatgggggaacgaatgaagaaccaaggccaaacacaaaacacaaaaaaacccaggaaagtagaactttagggaggaggcgatctgagaggtaaatggctgaaatgctactggatttgtgtttctggaccatggctcctaacaccagaaagaagggccttttctggggtaggagtatttcttaagaggcctgggaagaatgttattgccttgagctaactggccttatgaagaggaccttaaactgaattgccaagttattagtattggtattcatagactttggagggtagcaggacaattttccattttatcctccatttgtttgagtggtgttacctgttctctcaggaggatatgtattggatgggggagcactgtgtatggaacttctcacaaaacagggctgtagctgtgcctacacaaaagaattggtcattatgcaaataaatgccatcttagtcagaggcaaagccagagtgcagtttggagctaataagaatcaatataatctagcaagagcccaacaatcctataattccattgtacagatgcatgagaaaaatcgtccctctggacatgctgccacctggccatgcttcctttccctttcatctttctcattgaccaatgggcttggagcattgagaccacaccctattctgagttctagtgtggccctggttaactctcctctggatcagttgcacatctgcccggtagatgactggatgtgtttagcagtggttgccaggatcgtgctgatatggccccaaccccacctcccaccctgcctgtgatgtctgaagaaaccctacagagcaaattggctgtggccaagaaaacattgagagaatatcagcatacaaacaactctggtgtaggtacaagagcaaaaaaggagaaaatgaaaaatggcagcaatcctgagacaaccacttctggtggttgccattcacctgaggatatgtgcaaagaccatgctttctcctctacaactgtctgctcatgacaccatgttagctggtggtgtctcttcccctggtgccagtctcactagcatggcggcacctcagaatcatgatgctgacattggtcccaatctcatggatgaaaccaagactttctcattgatcaagagcccaggacaactcttcaacagctcaattgtcttgcctctgagtctacatcctttgtcaatggggagggccctgcatcatctgctaacctgaaggatctggagaaacaacaaaaccaagaaattctggatcaactggaagaagaaaagaaagcaagcaactgaaagcagggagccaaagggagtggttacaggttcaaattcagaccatagggatcctcatgtccgagaaggcagagttatggacagctctgtattacactcagcatgctgccaggcagtttgaaggagagtcaaaggatctggccagctgcctgcagtattcctggcgcgtgtgggagagttggagtgggctctctctgctgtctctacatagcagaagaagacacaaatacaacaaagagttaaccaaggagagagatgccctcaggctggagttatatgaggatctgaagccacagaactcagaattagaagagaaatttgagtcctagtgacagagaagtcaggaatccagctcaacttggaggatctgcaaaagaagctggagaggccaagctcctgcttcaatagtcctcaagccagtgtgaaccccctgatgctaaccagcagttacagcaggccatggaggagcaggcacagctggaagcacacctggggcaggttatggagttgctgaaacagctacagatggagaaagaccaatatactgaaaatctgaaaggagggagggccatgcggtagcagaggatgcagccgatgtcagagcaggtgcacacattgagggaggagaaggagcacagcatgactcgggtacaggagctggagaccagcttggccaaactgagggaacagatcgctgaacccctgctcctggagcccccagcagggccctctgaggtggagcagcagctataagtggaggccgagcacctgcggaaggagctggagggtctggcaggacagctccaagcccaggtgcaagacaatgagggcttgagtctcctgaaccgagagcaggaggagaggctgctggagctagagcagaaggctgagctctgggaggagcaggtggaggtgcacaggcaaaccctggagaccatgcagaatgacctcaccaccatcagtcatgcagtcttccagaatggtgagctcaaagagcagctggccaagttgcagactggcttcatgaagctgaacaatgagaacatggagatcaccagcacaccacagtcggagcagcacatcaagaaagagccgagcgagaagctgggtgagctgaaggagatggtagagctgaagagccaagaggctcagagtctacagcagtagtgagatcagtacctgggtcacctgcagcagtatgtggccacctatcagcaggtgccctatgagaaggagctccacaagcagttactgctgcagacccagctcatagaccagctgcagcaggaggaagctcagggcaaagtcgtggccaagatggcctgccaagggttgcaggagacccaggagcacctggaagctaccagccagcagaagtagcagccacaggcccagctgaccctcatggctctccatggggaaggagatggactggacagtgaggaggaggcgcttccgctcatgccaagcatcccggaggaactggagagtcgggaggccatggtggcatttttaaactcagctgtggccagtgccgaggaggagcaggcatggccacgtgggcagctgaaggagcaaagggtgagctgtcaggctgtcagtgtctggctcacctggtggcctcagtccagaaggagccagaggcagcagccctagtcccagggactggaggcgattctgtgtgtggggaggcccacccggccctgcagggggccatggagaagctgcagagccactttatggagctcatgcaggagaaggtggacctgaaggagcagatggaaaaactggaacgtcgctgcatccagctgtctggagagacagacgtcatcagtgagggggaggccagggcatggcagggggagctgcacggtggtcagaggggtcccagcgtctgaaccctgtcctcccgcaggaaagtacatcacactgtaccagagctagaggtcagtgctgaagacgtggcaccagaaggaatacatcagcagcctggcccaggacaaggaggagatgaaggtgaagctgctggagctgctggagctgcaggagctgcaggagctggtgttgcggcttgtgggcaaccacaacaagtggcatggcaaattcctggcagctgccaagaaccctgttgattagcccgctccaggtgccccagctcccacaggagctcggggctgccaacaaacagggtgatctttgcaagatgagcctcgcccacagcatggagcctgcacaagaagaggccagggagggttctccccatgacaatcccactgcacagcagattatgcaactgcttcctgagatgcagaacccccaggagcacccaggcttgggcagcaacccctgcattccatttttctatcatgctgacaagaaatgaggtgaagatcaccatcatctaaaagccggccactgtcagcaaagcttggagaagtggggccagaggctccatccccaccaggtccttaccaccccttcccagtcaccccattatccttagaggagcaaggtaagacccctgtgtgatggggggagacaaacaagtgcagaccctttgccaccttggccagggctgagtccttaatttctggatgattatgttgttatttaagagccagaggctcatagggttgatttatttgcaggaggcctggtggcctccctgatggcctgactcactaagcaacttttccttcacgggggctcccatcttcttactcagagaggcagctgaggcaggacaatggggctaaatgtagaccaggcaagagaacaggctgctgggggtggctccccttccccagtgtacatattctatctgtgtaaaattttgtatattccagggtagggccaccccctgtatcatacatagaggaggttgaagctggtacatggggaggaggttctagtaattatttgggactgggaaacttctttattgatagtacgggacagagaaaggaggcaaggatggggtcatggtgccctggtgatgcaacttctgtttattttgctttttcttttggaataaatggatttagccattttggttgggggggtgggagcagaaagaagaggtaaatactaagtaaatatactaacacctgagtagatcttcttcaaaagctatctattggaaaaggatttaggtgcaattagcatatccttcctaaagtaagcctcccctgaagaaatgtcactggtataatcatgaggcttaaaagagggagagataattaagtggggtgacattttaaaaataagtacctaattgttaccggtaagcatgctgatcctcataaggctaatgatgccaagtttatttactgctctaaagaagatagattttaaaatcactaaatcacatttcatttaatctagcaagttttagttgcatttacatttattcaatcatagaatcatagacaaccttgaaagtaaacagacaaatatgctaagaacattcttcctgagtgcagggtggaggtagtattttaacttaactgtctagcacttgatatctatctggctgtcccatataaactttgagggaagtgactgattttactcttgtggtacatgatttataacactatttatttgaagccgtatctatgtctacccatggctcagtaagccattttgtttcacagtaaaaatcattaaatgagcatgtcatatattttctaatatatttctgtaaaatttagtacatgtatatgagtaaaaattatagccaaaaaagtcagtagtgtggggagtaactagggagttgactaaccaatctttaacattgatcaagcagcagtttaaaacttccagacagcctgaatgataattgttagaagacgctacttccatgtgtccaagttataatgctttggtcaactaattaagagcccttagaaaatcctttactacatataagtgaaacataaaagtccaatattcaaattaattattttaggtctgaatattaacaaatgccactctagtcatctatcactcgtcacacatttattgaacacctactgtgtgttagacactgtgttaggaactgaggaaatagaggacaaagattggaccctactgtcttacatagctcagaatgtctaggacagaccaacaaaagaaaaatggtgggattttatgttgtgagtcatgaaaaggcatgcccagggtgctataaggctcagagaaaaccatctgacagagaagacccttagtccaaatcttgatggatgagttggagttacctgcacctttttcctccacaagaaaaaaagaaaaacatgttctgagctctgggacagcatgggcaaaggcatccctctgacgcatttgaggaaatgctgaacagagtgggttctgtttctgggatgctccgggaagtgagtggaaaacagaaagtagagctttgtataccctgaaaaggtgcttgcacttttttccttaaaatcatgtggagttgcaggatttgacataaatgaggattttaagtgatctgatttagagatcatctggcggccactgtagaatggatcaaggggaacaagactaaaggcagagacagcagtgccagaaagcagagaatggccatgagaaaattttaggaagaatgagtagaacttggctattggttgtatcagggctgagggagaatgtgcagtgtaggaccactaagcagtgtagatgagattgctcataggatactcggaagcaggaggagcagcagtttggctcaaggagaatgaagaatgatgatgaattcaggtttggtgcagtggatctgctaagtgaagaggacaatgggcagttgcttacccatcaacagctcaagaaagtgatattagtggaagtagagatttggtagcatcaacccgcacggtaatctctgaaactataaatgtgggtgagatttcccaggaagcaagtatgatgagaaaagagaagagagctaaatcctggggaatgttgacttttaaatgactagcccaagaatccaagaaaactgaaaagtaggaagtgaagatataagtaaactaagagtgggattacagattctttgaaaagaaaaagtttcatggaaaaaaattgtccaaaaaatttttaatgcttcagaggttttattcatctctccatttctttattcattcagttaataaatatttattgggcttttagtatattctaggcactagttaaatttagttgctaaacaaaatcaaacctgtcctcagatagattaccgtttaatggagtagactaattttaagtaaatgagccaagcagtatacgtgtcatttcaaatcatgatgaatgccataacaggatgctaagtgccataaaggatatcctgggcatgatcattaggagatcattggtgacctttgcactgttagccttgatgcaatgagagaagcaggaagaagccaaattgccaccaaattgccatgagttaaggatgaatgtgagggaaggatatagagtaaagcaggtaggcaactctcttgagaagcttgattgtggcaaacaatagggcaatagtaagaagaaaactaaagccaaacattttttgttttaatacctgggaatatggaggatgtttattggctgagattggaaggaaccaaccaagagaaacagttataaatttaaaagtgagaaaaaaataattgatgaaattggctaaaattaatgaaaatacaaatatctttcaggtggattcaaatgagctaaggaaacactacaggacttctacaaaatttcaggtaggtgacaaacaatttcaaagttgctcacgtgatctattaccattttgactttaaatcccatctatagatttctataaacaaagtttgtacatacgaagttttattagacaatgataagcctgaagtttctgcctctcaataattacctgatatgtttccttgtatgtgcaagtgggtaattcaacatataagcccttattaagcagaccaaaataagttagtgcccagatttgaattctaatttacacatcagtaaaggaatatgggttgtatactttgtcttgtctacaaaattctagcccccaattaatgtagcatgatgttgtaaaggtttgcaaaattgtttttactcccgcttctttcttgttctcatatattcaaaataaaaattattaatagaagagaagcaattgtttagataacatggaacgttcctttcctaaaacataacgttttattgcccataattattttctaagtactttgttctctgagaaataggcagaggtcaggggttatttaggtttacccaattggagtgaactctagcctctcacttcaaagacaattctttagtggcctcagagtttgtttaaaaatacaaatctgggtttaggtctcagactatccttgttggaaatctacaatgattacatccctttcaattgttttttttttaatctccgactaattttctttattaaatattgccacatacttaggcatattcataaaagatctctatgctgctttgatgaattctacaaagaggataaatacttttgtaatgccataaagcttattccaaactcttactttcctgagtttgaataaggactaaattaatttatatatttaatatgtgttagcataatggcatttcagtcaatgacagaccacatatatggtgatggtcccataagattataagggagccgaaaaatccctattgcctagtgacatcacagccatcataacattacagtgcaatgtgttattcacctgtttgcagtgatgctggtgtaaacaaacctactgggctgccagtcatataaaagtatagtacatactaatatgtatggtacataatattggggataatggcaataaacaactatattactagcttatgtatttactatcctgtactctttattgttatttcggaatgtactcctatgaatttttttaaaagttaattgtaaaacagcctcaggcaaatctttcaggaggcattccagaagaaggcattgttattataggaaatgacagctccacccatgttatggagcctgaagaccttccagtggggcaagatgtggatgtggaagacagtgatattgatgatcctgaccctgtgtaagcctaggctaatttgtgtgcttgtgtcttggtttttaacaaaaaagcttaaaagtaaaaataaaaacattttaaaatagaaaaaagcttatataatacatatataatgaaaatacttttgtatagctgcacaatgagtgttttaagctaagtgttattacaaaagagtaaaaaagtttttaaaaattcaaaagcttataaagtaaaatagttacagtgagctaggtttactttattattaaagaaaaaattgttaaataaatttagtgtagcctaactctacagtgtttataaagtctacagtagtgtacagtaatgtcctaggccttcagtcactcactactcgctcattgactcacccagagcaagttccagtcctgcaagctccattcatggtaagtatcctatacaggtgtaccattttttatctttcgtatcatatttttaactgtaccttttcaatgtttagatgtgtttagatgcaaagatatttaccattgtgttacaattccctacagtactcagtacagtaacatgctgtacagtaacatacaataatatactgtaatatacagagcatgctgtacagtaacatgctcctaggcctgtagcctagaagcctaggcttgtatgtctataccataccacctacgtgtgtagtaggcaatacatctaggtttatgtaagtacatgctatgatattcacatgatgaaatcacctaacaatgcatttctcagaatatgtccctgttgttaagtgacaaatgactgtatttttgtacctgatcattcactattagcttgttaacttcttgtgaatagaaacaatatcttactcctatttcaaccccaacatgctttgcaaattgtcttgcacagggtttagtgttggtcaatacttcaattcaattttctacagttcaatgagaaataaattatctctgtctacacaaatctgtgccaaaaatggtcaatgattaatgactgtctgcctagagaagttgagaggggagttgaggaattgaatagaaagcaagcaaaaagatcgttatgatttaagccaaaaactgtaagttttagggtagcactatgtcaacagtgtatctgcttttttattttaaatacattattttaattacgttctgtacacttaacttgttacaaagatcgatacctctacagtgaaatcaatgaggtttgatgatatgatgcaatttctaagccaatacttttagtaagtaatttgtttataatagctaatctggttaattcaaaccagaagtccctattcttgttcaatatcggcaggctttgaaattgttaggcaattaattatctcaactctatgcttttggggtacaagtggtttttggttacatggatgaattatatagtggtaaattatgagatttcagtgcacccatcaccagagtagtgtacattgtatccagtatgcagtttttttgtcccaccccaaacacacccccccttctggtcttcaaagtccattatatcactctgtatgcctttgcatactcagagcttagctcccacttataagtgagaacgtatagtgtttggttttccattcctgagttacttcacttagaataatggcctccagctccatccaagttgctgcaaaagacattgattcctttttatgtctaaatattattccatggtgtacatatgccaaattttctttatccactcattggtcaatggccacttaggttagttccatatttttgcagttatgaattgggctgaaataaacctatatgtgcgtgtgtctttttcatataatgacttcttttcctttgggtagatagccagtagtgggattgctggatcaaatggtagatctacttttagttgtttaaggaatgtccatactgttttccatagaagttttacatatttacattcccaccagcagtgcatacacactccccttttaccacatccatgccaacatctattgttttttggctttttaatatggccactttcaggaataaggtggcatctcattgtggttttaatttgcatttccttaatgactagacaggtcactaaaaagcagacagtgtgtctgcttttttatttttaatacattattttaattactgttctgtacaaatcttgttacaaagatcggttggttccatattttttgcaattatgaattgggctgaaataaacctatatgtgcatgtgtctttttcatataatgactcttttccttttggtagatacccagtagtgggattgctggatcagatggttgatctacagaaatctgtgccaatgtgttaatattaaaatggctaatgactaatgactgtaatcatagaggagttgagaggggagttgagcaattgaatagaaagcaagtaaaaaaaatcattatgatttgagctgaaaactataggttttagagtagcactagacaggtcaacagtgtgcctgctttttcattttaaatacattattttaattactgttctgtacacttcttaacttgttacaaagatcaatacctgtagagtaaaatcaacgaggtttgatgatatgatgcaatttgggcgggggggcatttttttcatgttttttggccatttgtataacttcttttgaaaaatatctattaatagcatttgccaactttctgaagagattatttgtttttttcttgctgatttgtttgagttccttgtagattctggatactagtcctttgtcagatgcacagtttgcaaatatttcctcccattctgtgagttgtctgtttattctgatgattatttctttttatatgaagaaacatttttaatcaggtcccatttatttatttttatttttgttgtatttgcttttggggctttagtcataaattctttgcctaggccaatgtccagaagagtttttccaaggttatcttcaacaatttttatggtttcaggtcttagatttaagtctttgatttatcttgagttgatttctgtataaagtgagagatagggatctagtttcactcttccacgtgtggcttgccagttttcccagcaccatttattaaacaagatgtcctttccccaatttatgttttagtatgctttgttcaataccagttggctataagtatttgactttatttctgggttctctattctgttcctttggtctatgtactacttttataccagtaccatgctgttttgctaactataagtctggtagtgtaatgccttcagatttgtgctttttgcttagggttgcctgggctgtgagggctctttttcagttccatatgaattttagaattgttttttctaattctgtgaaaaaaaagttggtattttgatgggaattgcattggatctgtagattgcttttggcagtatcgtcatttttacaatattgatccttccaatccataagcatgagatgtgtttccatttgtttgtgtcatctgtgatttctctcagcagtgttttgtagttccctctgtagagatctttaacctcattggttaagtatattcctagggatttgttattgttgttgttttacagttgttgtaaagggattgagttcctgatttgcttctcagcttggtcatttttgtatgtgtattggtgtatagcagtgctactgatttgtgtacattgatttcacaacctgagactttattgaatttgtttatcaaatctagaagtcttttggagatgtctttgtgttttctaggatacgatcatatcatcagcgaacagtgatattttgatttcctcttttttgatgtgaatgccctttatttctttctcttgctggattcctctgtctaggacttcctcagctctctattttatatgtgtggccttacaatatgttcttaactgctcttaattgtcttaaaatgtcttaaagtttttcatataccctattaagaccatgtaaaatttaataaaaatgaataattattttacacaaaagaatttcttattgttgttgccatcaagaaagtatgaagtatgacattgtcatttcataatgaccagggtaacagaaggccaaaataattttaatacatgacaatttttgaaaatttcttagctataataatattttcaataccttctcccatcagagctgctgattaattgcaaacattattgatttctttgctctcctctctcagcctgcacaggctctgatagatacttttaaagcagtttattggtagcaaaatggttcgaagtagacaagagtagaaagcattgaagagcctaaatgaaccacaatataatcaactgtgaacacaggagaattggctgaaacataaaaatatatcactacaatgaaagtacaatgctttcaaataaaatcaagaatggacttgatttttagtcgaagagccccatgttaaaaacactgttaaaacgtattttaacattagcaactatgcccattgtatatgtgacagctcaataaaaatcccagtaaatgcaacgcctaaggagagatcagatgcatggaggtggaaatgaaatatgttggaagaaggctacaaaatagttttcatggtgctaatacgccttaaaaagccccatgcatagttaattgaaagcagttttggattaaacaacaaataatatattgtgattggtcaacttttacagacatcagcgtaaatccatccattcccagaaaggcatgtaaacacaacatatttgtgaatgtgttctttcaacagttggatgtcgcatcaataataccatttgatatttgctacctcttctttgggtttaatccaatgtttagagcaaataggatgttaaaggtaagataactatatttaattgtcttttcccttataatggaaatatttctatttccctataatggaaatcttgaaacaatttaaagtatcttaaaatgatcaatattcttaatttttcccaaactcttctccatctttctgccctcatcaatgctataattttttttaatgaatgaagaaaaaaatgtctactggtgaaagttgctcctggtttttatttcatatctcataacagatgtttttataatctaaaatagggatgctttgtatttctaaatttagctataattacaaatgagtattttatactttttgtttttttctatttgtcctttttcagttgctgaatgcatggtgtatgggatgtaaaattaaggggttaggttagattaccctaaattatcttactcatcttaaattttgtaattctaaaaaaaaatgtaaacatacttttacatcacagacatgctttcacaagtatgtgagcacatactttcacatcacatttacttacatacttgaatataactcaaatgtttctcaagagggaattagttaaatataccaaaatatatttatataatttatatagtagaacattttgtagctttaaaacaaagaagaggaagctttttatgtactgatatggaaaaaacttcaagataaattgctaagtaaaaaagctagttacagaacagtttatagaacaatactaccttctgtataacagaaaaggaaaaatattcaatttttgtgtatttacataaacactgaaaagctacaaaaagaaactcatcaaagtggttacctgagatggcaagggaaagcaggaaggaaaatcaggacggataggggcaagagtaagagtgagactgttggaagcatatatttcatattgtttttgaactatgtgaatgtattacctattcaaaatggttataagacataaatactttataactcatagcttcatttgatacctaaaaagaatttgaggagagtcagaaattgaaatttcatgtaaatctttaacaatagcaacaatatatttccaaaaacaaccttcttaaagggatcacaaaagactttataaattgtaggtaattatctattttgcatcttgggaagacaagataacataacctggtaacaccagcagatcctgacaacaacaacgacaataatagttgcagctgtctgttgaatacacacttgaggctacacactttgctaaaactttatattcattatctcactgattcctcccaacaacttcattttagagacgaagaaaatgagaattagcatggcggaaaaatctgtccagacacactgcatatgaggggcagtgtctgaactctatcacatttatctaactccaaattctttattataatcagattgactgggtaggcctcaggctgaaagggtttttttttctctgctctgatatttaaacttcagaggttctttatcccatatttccaaacatctgagacaactctagagacttctggtttgaccatggaatgtgagaataaatggaggtggaacacaataatgttccaagcaatctagtggtcaggccatcccttatcaaattttcagtctcacatggaaatttcagaaggtacctgcttggacataaacaattttcagaaattctcaggtttctatagatttaggagtttatctggcattatgataaaagcttataaaatgccaactcttcattccccatctctgtaacctaaaatgtccaaaagccctctctatccattagatgtttaaatataggagatcctgacagtcaacattaatcttcttttcaaagccccatagtccattcatataacttatttttaagggtgtcatcttaatgcacaattccctaggataaatatttatcatctatatgtctccaagttataaatgagaaaacaaatgaatatacattttatttttagtgaacacttaagctaaatttaaaatcatgcctttgtgcaaacttgtattaagagcacaataaacaaattaccacacatttaaattataatctgagtgtttaagaagttttttcctacttaggaactctggaaaaaacaaatcatttgtgtatatttctagttaaatagtcattactattacatatactatttttaattctaaacgttctattgcagtcatatctacgttgggcaaaattttgaactaagtaatctctgcagtcccttctatctgtaagagtctatgatttgaagcacattaaatatattaactcatgtatgcacacaacccttttggggggcatcttttcttattgatctcattttacagatgaggaaaccaagacacggaaatagcaagagacttttccacagttacacagtagtaagtggtagagatagaactggcattttgctctggattccatactttactgcctatagaaacaaaagaggaagtaggaagtaggaagtaggaagtaggagtgcatgcaggcagaaaaggttgagataaaagtagaagcaagcaagaaaaaaccttgagggaaatagtaactctgcttgtatcagatgcacataaactctttgtatctttgaataatgtcaagaacggccaatgctaatacttactgaactttaaattttgtttaaacaaatacacatttaatgcaatttactgaaaaataatgctagtgttgagcaataagacttaacatctatttataactttaatgcattatacttttcctcttttatgtatgtttttggagagtgtgactttaattgttgggaaacagagttctactacatgctttcaaaacaaaaaggaaaacaatgttttttaagtttcattttcaacaaacattaaaaataagactataactacagggtagcaataaaataaagcaaaataaagctctggaagtataataccatgctataaaatgtactgtccagaggaaaatatcactaaacaggatcttggtttttttaaaaagacatatgaatgaaattattttcagtaataaaatctatttcatatagttttatttaaatatatatatttaagactaacatgcttttggatttcttttgcttttctatatagtacacttcattttttgaatttaatcatcacctagagtctataatggacaaagcatatatctacaggtaaagtataactcagtatacttgggggaaggggaaaaagcaatggtacaacattttagacggaatttggcagggatatgacccccctcttcaaaaaaaggatataatttcagctttggctatataaaatataggactatgttctagaacagatgtggatattttaagtgaaataagagtatgaaaatcatatcagattttagaatactggactaagaaaataggacttattatctgcctctgtcaaaacaagtacagaaaaacatactcttttgcaagttaactttaaacctttctcatgataattcattcctaatctgaatttcattcgtttgttgttctaaattttacttgcaccgaaacctctagttgccattcatcgtagcataaagtctcatgagcttttcagagatatccagttaaattagcatagtgtattttatgggacttaaactgaagaagtgacctttgaggcatgtctttcacggagttgactcacaacatctgtgaaaagagaggaagttttctttttcttttttttttctttacactctgtcaatcccagtcaagacattgccatcagaaaacatgcaatggcaccatcactttgtactgtactaatgagagttaacagttcacaaatccaaagcaaggggttcgctggtgactttaaggaaaagaaaatgttaaaataggctgtatttcagaaacaacatgaatcttactttgcatctattctctctgacagagttattcgaacaactggatacttgctgtttattctgcacattaatgcctgtgtttattactgggcttcaaactatgaaggaattggcactactagatgggtgtatgatggggaaggaaacgagtaagttctgattttgaaagaaacctttattgattatttttaacattctgtttcattgtatgaatttatgagagccagtgtttttgaagctgtcataacccattcaatggctggtaaatgctatttggccataaaaaaggataaaatcatgtcatttgcaccaaaatggatgggactgaaggtcattatcttagtgaaataagccagacccaaaacgataaatatcacacgttctcacatatatgtgggagctaaaaattttgatcacatagagacagagagtggaaagataacagagactgggaagggtgagtggtggggagaggagcgcataaagaaaagtggattaaaggatacaaacatacagtaagaatatattcaacgtttgcaacagagtagggtgactatagtttcaaaacatgtattgtactcgagtaataaacaccctaaacaccctgacttgatcactatgcattgtatacatgtaacaaaattgcatgagtaccccatgaattggtctaaataaaaatttttaagctgaaaaacctctttagtaagtcaatacatttttaaatgaaagaagatagagaataatagaatagaaaatatcagagtctgatagatagtaggggagtgtgtgtgtgtgtgtgtgtatcctgagttggcctgtgaaatgcattttttactctggatcatgatcaaaaaagtttgaaagcctctagacaactgagcagtaaggtaacttttaataactccgatgccgattgttagtaatgaacaatgttaattatttaaagggcaggtgcagtggctaattagtttaccagtgaagggttttatgggtttatgagtcagctataaccactaactcaattaaacacttagagagtaacgaggatcataaattaaacttgacaattaggtatgcaagtgtcccagaaataaaaaaagatcacttgaaaaatttagaacagtagaatcaggactcagaaatggcaactgggttatttaatagtgaaatttccttttggtaaaatacaaagacctggcataaagttgacttcactaactttctgctccagtgaaatgacattgaacatataataaggcaatgtccaaactggaaaaaaagcaggtcccagcattactttgaagggcaactcactgcagccttgggatggagagcaattataggatagagcaaagagagggaaaataacttacaaaattacatactacctagagtgagttggatatgtataagggattataacaaccagaaccgattttaaagaatttaaagtcagaaggaccactgattgggaaacacacacacacagacactcaatttccagaaaatttactaaataaataattccctttagaatgtgaattatttactttgatataaacaactaatttatctaaaaattgactaaaataccagctacagtaaaattgcctcaaagtgaatatgtaatccaacatcattagatgactgtggctgatagctgtttttttcaaattagcaaaacaatataggattgcatcagaatgccttccagaaagtgaagctatttctccttttacacctagacgcctctctgtggagtttctagggactatatcttgttcccagtgttaagctcagtgttaagtatataataatagacaatatataggtatataaaagcaggaagagagagggggagtaaggaaaaacgaaaggaatggccaaatctgcattgtaacaagaagaaagaaatctcagctttagcccataagaaacttcaagtgtgctagtgttttggatttctaattccagctacatcatagcccaggtagccaagatactctctctaaaatgcaagataaattacctgttgtaattttgttaagttacttattataattatttgttataagtttctaaatgaatacaattacaacagttttcagtgattgctgagttccctagaaagtaagaagtatctccaaaggctaaaacacaaacatatgtaccaaacctggagtacaatagaaaatgagtgtgagtaaccactaaagaacagaaatagagagaataacttctaaattagtataaggggaaaaaaaaatgaataaggaaatttaaaaagcaaaccagtccaaaaaaagacacaaagataaggagtggcagttttggggagaagtacaggaaaggcaggacaatagaagacacaacataagatggtaaggacaatttaaaatagatcagtatgttaccagaaaggggtcctgatccagaccccaagagagggttcttggaccttgtgcaagaaagaatttggggcaagtccatggaataaagtgaaagcaaatttattaagaaagtaagaaataaaaaaatagctactgcataggcagagcagtggcatggactgcttagaatacctacaattatttcttgattatatgctaaacaaggagtggattattcatgaattttcagggaaaggggtaggcaattcccagaattgagggttcctcccctttttagactatatagggtaacttctggatattgccatggcatttgtaaactgtcatggtgctggtgggagtgtcttttagcatgctaatgaattataattagcgtataatgagcaatgaggatgacaagagttcactttcatcgccatcttggttgtggtggatttgggccagtttctttactgaaacctaatttatcagcaagctctctgttacctgtatcttgtgccaacctcctgtttcatcctgtgacttaggatgcttaacctcctgggaaggcagcccagtaggtcgcagccttattttacccagccccttttcaagagggagtcactctggttcaaacacctctgacaaatatgtgcagtaaattaatgtgaactaaactcacatgctaatagagattgtcaattaacattagtcaaaataagctttaaaacaaaaccattttagagaaaaagttcaccatataatgataaaagttttgattcatgattgtcaaaagacaaaattacaacaaatttattttaatgatcttaattggcttttatttgcaattctagaatcacgcaacacctcaattctataaaataaaatgagtgttctgatgagctgagcaaaggaggttggcttcataggcagaaaagggctgaagaaagcagaaacagagaacaaaaacggactggtcatttcaaagttactttccctctaaaggttaaagtagaggggacttccttaccatgctggataaaactggctagtttggggatttagctatctctctttctctctctcctgatttcttggaatggcagataaacaacttagtttcagtttggtgacatagaacttcagcatgagtaattccattttgctttggtctgtttggcctagtgcaagagtttagtccaaaccaatggcctcctataaattttatttactaccatcaagatattccaattctaaatgtgtatgcacccaataaaatacttacaatcattcaaagaaaaccataaagcaaaaattgatagaaggaggagaaattggccaatatatcatcaaagtgtgagacaccaaacataattattgacaggtcaagtaaccagaaacaataaacatataaaagatttgataacccaaataacaagcttgatttcatgggtacaaacagaatcttgcacccaaggattagaaactacccatttttcttaatcactcacagaaaaactactaaaagtgatcattttctaggcccaaacctagtttcgataaattccacagccttgttatcatacaactcacattctctgactataaatattaccccatcagctctgctctgctcatttagactgaagcattctcactcaaaaccaaagctccaacaatcctgttaccaactgtcagggacacaggttgccacccttgcaatgaaaatgcttttaaaagcagcctctttacttatctttttagataatttgcatatgtcagttactagtatacttatcctaatagtttttttaacatcaatttctccttctattgcttcatgttaccctttgatcttgtaagccaagtttttgcaataattacctattttttaacttaacccttgtgatggtcctggtgacctataaattgaaggttgctcattaggcctttggatttgcaaattttgacctagttagaattaggcagcagactgtggggcataaatggaacactgtgaacatttaaaataagtcaagtttattatgattccattaattctcatcagaacagcaatttctattcacatcaatagaaggcatttttatttatattgagtgaataacatccttctttagactgtaaaatgtgagaaagaatgcaaatatttagttcaaaaggagaacacaagtaagtacctaagattatgtgatacttaaaaatgttcccaatgtatttttgtccacatatatcccaattttatgtattttctgacataaatttcccactgtgcacaaattttttaacaaatccacagtcccagtccctaatgtatcttctttgaaaaaaagagaagtaaacaaggcatcatgggaattattgactttagttgatgtaaggaaggaatcagaattactataccatagtgctagaaaaatttaggtaatccaccttctcaattttacagataaagatgatgagacttaggtagatgaaaatatttattcaggatgtcctagatacctcatagctgagatcagacaatggcagagagagagaaggaaagggaggaggggggaaagggagaggaagagggaggatatttatattacaattcctagagggtcacccttggaatataacaaaaacaaacaaacaaacaaacaaaacaaaaaaaaaaacccagagcaaagaatcagtggatcagaaggaagtgaaggtcagtgagaagcatgacaggggagagttcagaaggagattcaacagatgtgttcacagatacagtcttcctacattctcatttcagtaagtctaggtatgcattcactcatccattccagtcattcaacaaatattagtgaattcctattgtgtgctactaggcccataaacacctacctttgtagcacttacattctaataagaccgttctccctcatagccattgcttccagtaataagtttacagaaactagggactaagatggattgaggtagttaggaaggtccacacagaaagataagtatagaaggggtacttttaaaaattgcatgtcccactacagatttaccacaatggctgaaatttaaaagactgacaataccaagtgctgggataatgacaatgccaggtgttaggataacatggggttactggaactcacatattgttagagggaatgtgaaatgataaaaccatattggaaaaagatctgacagtttattttacaactaaacacaactaccctacaactcaaaaattccaatgtaggtattttacccaaaagtaatgaaaatatatgttcacagaataaaacttgttcaagaattttcacagaagctctattcatcaaaaccaaaaacttgaggcaggctaggtattcatccataggtgaataaataaacaaactgtggtataaagatacaatgaatactatgcagcaataaaaaggaataaattaccaatacacaacataaataactctcaaaaccatactgagtaaaagacatcttatacggaagcatatatactgtacgatttcatttatgtgaaattctaaaacaggcaaacttatccacggtagaaaaaaattagaacaggtgattgcctctggcgcatttgagtaaggattgactgggaaaagaattgagagaactttctaaagtgatggcaaggctctatgtcttaacatgtgttttgttacacaggtatatgcatttgtcaaaatttattaaatgatacaaaaatcagtagcatttctacacactaacaataaactctctgaaaaggaaattaagcatcaaaaagaataaaatatttggaataaacttaaccaaaggggtgtgagacttgtacactgaaaactgcaaaatgctgataaaaaattaaagtagaaactaataaattgaaagacatctgtattcaagggctagaataattaatattgttaaaatgtcccaactactcacaatgatctataaattcaatgcaatccctatcaaaatctcaatgatttttttacaggaacagaaaaaaatccaaaaatttgtatggaaccacaaaagaccccgaatagctaaagtaattttgagcaaaaaggacaaagccaaaggcatcccacttcctgatttcaaaatatatcacagagctaccataatcaaaacagtatgaaactggcataaaaacacacatatggtccaatgaaacaaaatagagagcccagaaataaatgaatacatagatggtcaactgcctgtccaagggtgctaaggatatgcaatgaggaaagatagtctctccaataaattgtactgggaaaactggatatccacaaacaaaagaacaaaataactaccatatgacccagcaatgccacttctgtgaatatacccaaaggtattgaaatctgtatctcaaagagacatctgcactcccatgttcattgcagcattgcagcattattcgcaatagccaaaacatggaaggaacctaaatttctctcaactaatgaaaggataaagataatatggcaaatatgcacatatataatagaatatcattcagccttaaaatgaaagaaattctgccatttgtgacaatatagatagtgctgggggacattatgcctagcaaaataaacaagacacagaaagagaaataccgtctgacctcatatgacctcacttgtatgtggaatctaaaagagtcaatttcgtagtagtagagagtaggatgggggttaccaggggctggaggaaagggataatggggaagtgtaagtcaaggagtacaaagcttccattatgcaaaatgagtaagtcctagaaatctactgtatggcataatgcctatagataatactgtactttctttaaattcaccaaatggtcttacttaacattagtgcctttttttttttttttttttttttttttttgagacagggtcttactctgtcaccccggctagagtgcagtggcaccatctcagctcactgtaacctccgcctcccgggttcaagcgattctcctgcctcagccttcctgagtagctgggattacagacacccaccaccatacccggctactttttgtattttaagtagacacggggtttcaccatgttggccagactggtctcaaactcccaacctcaagtgatccacccgcctcagcctaccaaagcactgggattacaggtgtgagccgccatgcccggcctcattagtgctttaactgtatattcaaaataaaacataactctaaacaaatactgaactccagttaacatatatattctgaagtactgtttttaggagaaagtttctggctgtctagaaattattttgaaatacatccaaaaaataagaaggttttattgataaataagtggaggaatatgtgacgaagcaagcatagtaaaatgttaatggtagaatctaggcagtgggcatgtgagtgttcactgtaaaattcttttaatttttctgtttgtttaaaatgtttcataaaaatatattgggggaaattgcatgttatgtttgtttcacagagaaaggctttctattttcatactaaatatttttatggctttatgtcaaatcctgccttactgctttaagtatgcctaagtatatgtgtatgtgtatatatatatatatatatatatatatatatatatatatatatcatgtgttatacagttgatgcattgtatagctaataattagatacttcatgtgttaatccagccagatagaatctctttgaaaagatctatctgactgggatgtagatattagagatggacacacttgactaattaagctaatcttaggaaatccataagaggtcatctaattaaattacaaatcttacctttggttatgcatgtctaggtgtaagatgtgactgagaaaagaatcctaaaataaatctcaaagcatcagggcagaaaacttccaattaacatagcagactatttaatataaaaaaaattgttcaagccaaacccttgagatttggaaaatccatgccaaaattttacatttgattgttattttttaaaatcataaaaaagaaaatgggagaaagtaattcttatgtttgttcctgttaaagtaggacaaacttttgagtgactttggaggggaagtaatcccaacacttatcatggaattgaccatgttgggagagaatcttgtttctcttcactcttgggtaatgtcaggtttaataaatttccttaatttaaagagacccacaggtccaaaaccggtgaccaaaataaatcaggtaataggaaattataaattggaatttgaaaagttaaaatgcaatccataaaattaattccagacttcttcaaggtggttctctttgacatcaagttcactatgatattagtaagtccaaggaagactgctagaaaaaaattatacagtggtaacatttttattctcttggcatagtggttttcaagccctaccaaagagttcattattttttctgttcctataacaaggaactaggttaaaaaaaaaaaagagtcctatgtccttcaaaaggtattgaatttcaaaatgagtaatttctttctagatctgtttttatttgaatattaacttcaactgcagtttctttctttctttgtaaacctcaacttcttactatttgaagatcttaaaatctcaaactatttttacaagaaaagaccacccttgttcaaagcttagtgcccagttacccaaagtgctaatgttatatgtggcatacctagataagaaataaaagctcgactagggcaggattccgtaaaaagtactccttttctgtgtctgtacaagatgctgaaatagctagttgggacacacaaaatcttaatgtccctctgtaacaaaacctggagacgttctttatataaatgacatttttaaaggattcagtggaaatgcttgatacagaccaagttatcagagctatgtagaattaccagatagtatgcctaagtgcacaagaattatgaaatatatatacagatgtctttgacttctgatgaggttacatcacaataaacctatcgggaaaatattgcaagccaaaaatgcagttaatacacctaacctaccaaacatcatagcttagcctaacctaacttaaatgtgcacagaacaattatgttagtctacagttcagcaaaatcatctaccacaaagcctagtttctaataaattgttgaatatctcatgtaatttattgaataccatactaaaagtgaaaagcagaatggttgtatgagtatgcaaagtatggtttctactgaatggatattgcttttatgccatcataaaatcaaaccatagtatgttaaggactctctggatagctaagtaaatgttatatgttctttactaatccttatcatattcttttctcatcctgttcctatctggtctgtaatgacctcagcctcttcatttgcaattgttcaagtacagaaattttatcaagtacatttctgagcatacttgattttcttcaataccaaatttctagatcagttgcccattacaatcaacagtaatttccctattaagatggagctcagctctcctctgtctctgccatggtttacgtattcaataatataataatatgtgggtgaaaaatagaagagatattcatctgttctgttttccactagtaaaaacaattggatctaaactatagaagattctctcatctgcataaatacatttgatctctataatattcccacaaatcaatagtgtagtagtttaaaaacagcctcaaatttttgctgcttctctcattgagaggtggattcaaatgtctcttcccttgaacctgggttggccttagtgacttgactgacaaatacaatgtgacaactataagatgatatagggcttctaagttataggaaacctggcagctaccacctgggctgctattgctctgggggaaaacagctctcatgtaaaaatccatctaccttagacatccatgctatgaggaagcccaagctagtcacattgagaggctgaatgaaaaaagatacccagccaccctctactgttccaatcttcccagctcaggatcagacatgtgaggtaagcagctaccttgggcattccaaaaggacataatgtggaaaggaacaggggaacccagccaacagtcagaatcaaggtttcagacatttggtttcaatcaaatctttccagatatctccagccattcaactcataccagctgagggcccggtcatcatggaacataaatgagtcatctctgttgggctttgcacaaaattctgacccataaaactataagcctaataaaaatggtggttatttagactaccaaattttggtaacggctagtaaacaccctccttgggcttgtttcatcatttcacagcatttattaagaagtttacattagcacacatgctgtttgccagtgctgtctagagaaagaaaatcttgattagtaggaaatttgttataatttaatagtactatattctcccaagaatagtggtctttcgatgatatagaaaaaaagcaaaatgtatatcttctgttttcacaggtatctgagatgttattattgggcagttcgaactttaattaccattggtggccttccagaaccacaaactttatttgaaattgtttttcaactcttgaattttttttctggagtttttgtgttctccagtttaattggtcaggtaagctgagtatgaatcactggatacacagtgctgtcattttgaaagactaacaggtctttgtaaactttatggaggaaaaattaaaatctgtctggttcttctttttttgaactaactttcttctattttaatgagttgaaggaggatgtgattagatcaacagtgcttttccatttttaagccattaaatctatcaaaagacctgtcagcaaatagcatagtttgaactctcagagaaagttgtttctaagttaactttttacttggaccctaatgaaaaccattaaaatctcttttatttacttaaatttcaaatattgttataaaatcactgggttataattgacttcagaggtcatttaaaccagaggctacaaaatgccatataaaataattaataagttattgtttcacaaatgtttactatagcatctccttgtatttattctcaaaaaagtcagtctagtaagaaattaaatacataaattattatattgaagatagttggcacttacaaaggatagagccctttttttttttttttttttttgagacagggtcttgctctgtcacccaagctggggagcagtggcacaaacatggctcactgcagcctcagcctcctgggctcaagggatctacccaccccagccccccaagtagctgcaactacagttgcaccccaccacaccaagctaattttttttgtaggacaggtggatagtggcctgaatgtaggagcccatgtaagaacctgatacagaaggcagttgggatatgggttccagattagttagtttacgcatggaagacacactctcaggagatttggccaccatctctaaccgtgggagaaacaagcaaggcctcagtcagcaaagtccctgatattaacatatcaaaacatagaaaataaaacaggttaatacagatacacggggatatggcagttccagccttaacatgttaatgaaatacagagaggggtagtaaagtaaactctatgtagaaaatatttaggtttaggaagatgaacactaagagctaaaaattgttaagtataaaatatcattatcttcatggctggggagattatattaacaatgaaataggaagctggtttgagagatactaaattcaaatccatttgaatataaatagcaaaaatcacattattttataatttctagtaaaatcaacgtgaagttgtcatatcacagtcaattttttctctgttttacgaatgagaaaactccagtttaaagagattaagaggcatccctgattcatacatgtagttcatagggtcgtatggaagaaccatatataataacactgataataacagtaaaatttaacatgtattgagcacttactatgtgcaagacgattttcacatcaagactaaaatactatttctagcaccagttcaattatcttgttactcatagtgtaatctttggacaagcagcagcagcagcacttgagaaattcagagttcaagccccacctcagactagtgaatcagaacttgtattttaacaaaatcgtcaagtgattcatacacacacgaatgtttgaaaagtgctgttttatacaccacaccacatctgcttttaaattggatttgaggttccaataggaacaagaaggaatatcaagtcactgaaaatgtggtagtagaccacaagagaaagattgaggctagagatacagatatgtgcctcaaactctcatagtgaataaaagatgctgagcaggggaacagatagaaataaaagtttaaaagcctgggacagaaaaaaaccctccactcactcaaaattcccacatagagactatacgatggaactaatcatcactctttttttattaagagacagggtctggctctgtgcccaggctagggtgtagtggcttaatcatagctcactgtagcctcaaactcctgggttcaagcaatcctctcacctcagcttcccaggtagctgggactacaggtgcgtgccatcatgcctggctaattcttttcttcatttattttttgtagaaacagagtctcactatgttgcccaggctggtcttgacctcttggcctcaagtgattctcccacctcatctcccaaaatgctgagattacagacatggagccactgcacccagccaatcatcacattttaactacaatattctattttgtgatgcaactcacagaaactgacatttttcttcctctcatactctcatgtacttccctagcctgcaatccattatagaatatacatcttcctcaactcctgcaacaacaaaacccaacattgctgaaggatatcacacaaaccattcaaattactgtcactacaaattattggagcctcaacagcaatcaataatgcttttaatagtccttgcttcccaacttaatactctattaaatctcccaagccctctcctaacataccaagtctcccagccttaggtgactaggtaatgtaagttatcagccaagaacagcatggaaaagtgagatctaggaattgaggttgttgaggaatatttggaagagccactgaggagtaagagactcaaaaagatatatacagttggactagctgcatagctcctctgcagatagttttaatatgtagaagaattttttggctctaaaaatggaaactgaggagggcatcacaattaaaaagagccatttgagctagactccaaagaatgagtcgtttttccataagcagaaaaggctcaaaagctactaaaatgaatgagcaaagtcttaggagtgtgaaagtgaggccctggttttcctccctagtataaacccacagtcaaagcatatttacagccacttgcctccctctatgtgagaggaagagtcgagctatatatcttttttgtgctgagaccttaaagatcagcttttaacctagagtgggtttttatgggtgagttataaacatccaagaactaaaacctgacagtttcttaagaattgtcacagcagtagatgatgcttcagtaatttcagcacatttcaacttctgctgaatactgtgccttaagcatgatgagatttgattttatctgtctaaacaacacaaagggaagtacagaggttgcaatttcatgatgaattgagtctatatagccagccacactggataatctatgaaggatgcattcaaagtaagactcaccaaaatggactagccattctgccagacaattgctcaacttttattgcacactccttgcataagcacagctgtataattttttcaatgtatactaacatttctgcagtaaaatacaagtttccaaagaagactatgtgtagtcctatgcattacatggctgaattctcacttggtttgtcctacaggtcttattgttgtccttattggatcagagagagaatataatttgcccaatattttatggaagtgggtgatattaggacccaatatcagtatgtttaaaatcaatccactgctgaaaagttgtctgggcaagaataaataaaataaaaatgaatgaatgaataaaatcaagtaatcagggcattagaaggaagtatatcatgtggaaaacatgtaatttgacttttattaactcatttcctctgctgggcgtggagtgaccatatttgtggttttagatgagagatgtgattggagcagctacagccaatcagaactacttccgcgcctgcatggatgacaccattgcctacatgaacaattactccattcctaaacttgtgcaaaagcgagttcggacttggtatgaatatacatgggactctcaaagaatgctaggtaagcatggcagattaccgattaaattcctgtaaaccttgtcatatgatgaaaattctgtaaggtagcagagactagttggatttgaacaaaaggttgaaaaacaactaaatgatccttaaagcattcgtttaatgctacaggttttttttttttcctgaaatataaatatcttactggttttgaaaaccttggaagagaaaaggctaaattttaatcagcatcttctggatgctcggtattacacacattgtctcatatagtcacacatacaaaaaaggaagtgggaaaattaggcattgtctatccctttgaagggtagaaaatggaggctcctaactgagaaatttgggcgaagacacagagccagcacacagtctaaatagaactcagacccgcatctcttctcttccaaactcttgctcttacttcaatatcactctcttacccagaacacagtacagttgacccttgaacaagtgggggttaacaatgccaaccctcactccacagtcagaaatccacatataacttttgaggctgggcatggtggcttactcctgtaatctcagcattttgggaggctgaggcaggcagatcacttgaggtcaggagttcaagaccagcctggccaacatggcaaaactccatctctactagaaatacaaaaattagcagaatgtggtgatgcaccactacactccagcctaggcaacagagccagattctgtctcaaaataacagaaagaaatccacatataacttttgactcccccagaactgaactactaataggctactgttgactggaagccttactattaacacaaattttgtatgttatctgtattatataccatattcttaaaataaactagagaaaagaaaatgttattaagaaaattataaggaaaagaactatacttactagtaattaagtgagactagatcatcataaaggtcttcatcctcctcatcttcactgtcgagtaggctgaggagaaggagaaaaaggagttggttttgctctcaggtgtagcagaggcggaagaaaattcttgtataagtggacctgtgtagttcaaacacgtgttgttcaagggtcaactgtactaatagaaagcagcaacctttcaggccactcccatcctgcctcagggcacacaattgcttccatgaggtgctaaataattaatggtgtctacaactataccactatactactgcagttaaaaataattgttactgagggatataaaataagtcgaagataatgcactgctagttgacaataatgaaactcaacttttagtttgttcttaccatatgaaataggaattagtgccactaagaagccaaaaatgctccagagtgcaaattacaatgaaattctcaaatcacaaaggttcctaagagcagacagaaaccactggttattatggtagggtcttttcttcacctttctgacacttttaagcctcttaaaactccagcctcgtgtttagaatctcttcctgaatgaccaaaacaacatgcctctctctagaacatctgcagctacttgaaggcatctgaagtgggcaggcagagcaacaaaaggagtggtgccaggcttcttgcctcgcaccccttagcgaaggcagataatgattcaactccttggcttaggaggtaactagagacagccctcggaaacaataaactgtgtttatatatgaaggattttcatatttagaatctatatttgaatcaaaatagggatgtaatacagcaatttctctcttttctaaataatataagaaaacattaaaaaaaaatcaactctcagaaactcttggaattctaaccattaagaatagggaattttctggaggggaacaaacgtgacccttggcctactggagggtggagggtgggtagagggacaggatcaggaaaaacgatgaataggtactaaacttaatacctgggtgatgaaataatctctataacaaatccccatgacatgagtttaccgtataacaaacttgcacatgtaccccagaacttaaaatacaaggttttaaaaaaagaaaaaaaaaagaataggcaattttgtttacggaacattttatcagcctgaagcccatcatttaattcacatgtagaaaaatctgtaatgtattcacattcttcatcgagttaataagcaagtaaataacaataatttgaatttactctcttagcacattttttctttagattccatcccagctgagccacctactaattatgcacaatggagcaagtcacttacagcttctcagggcttcagtcctttttgtttttcttctttctgcaaagtaggaatgagaacatttacccttggggttgtcacaagggtcaaataagataatgggtgtgacagagctctgtaagctctccagtgccacatggtgctcattattatttgccatcccttgaatgctaaggctggaatcaatagaatcagaaaataagaactagatccttcagccatgctagcttgttcactagcctttgtgctatgatcattacgtttcatagctaaagtttcagcaagcataatgttctggaattattcagtatgtcatccagggttaaaaatacttcttttattgcataagcataatagtgttattgtaataggtatggaggtccaatagaagtaatgaaaatatagaatctgatgcatctaattatgtataaaaagtgtttgcattttgtttcctttattttaaaaatttttctacttgtaccttggtgacttatttcattaattattctgcatcggggtttgatgtgtttatctttataaagatgagtctgatttgcttaagaccctaccaactacggtccagttagccctcgccattgatgtgaacttcagcatcatcagcaaagtcgacttgttcaaggcaagtgcttttacaattaatagactctgtatctatttctctatggaatctaagctcttgatttatacagcatttatgagtttttttgccttatgttttaacaaagtcaaaataacctagagaaattatgtggaattaaagagtcaaataaattacaggtctctcttcagccaacggcttattctttagaaccctctttctcttctaattggtgtcaaaaaagaagagttcttcagactcttcttgcattaatttaaatataatttaaattacatggctctatgtctttgctagtacatgtatcacctcccatctataaatgtgccttggcaattcacaacaaatcaggctccagaatagctctgtaatggcctgacaatcagagaattatacctaatcatgtcttctattacaaatactttggatttagactcttaaaatggccaaattttaatttagaagctttttgtttcaggaaaaaaaaattataacaaagaaatttttaactttttgagtgttttaagtattactactctttttgtgcattatatcacatataaatttttctcacctaatatttccttctgggtatagcattcaccgactcatccattcaattaattcattcaacaagtatttatgaagttcccaccatgtttcaggcaccactttagccactgggaatataatagctgaaaacaaatacttactcaagtggagcttaaattccagaagaagggaatgaaaaataaacgcataaaatgtgtggaggtgataacgccatgaacaaagttaagcaggttgtataggttgttctcacattgctattaaaaaaaaatacctgagactgggtaatttctaaagaaaatatgtttatttggtcatggttctgcaggctgtacaggaagcacagcagcatctgcttctggggaggcttcagggagcttttgatcatggcaaagggcaaagcaggggcaggcatcttatatagcaggagcaggaccaaggcaggtgtggtcagtgtcacacacttttaagcagccagatattatgagaactcactcactgtcatgaggacagtaccaaaggggatggtgctgaaccattcataggaaatccgcccctgtgatttaatcacctcccaccaggctccacgtccaacattggggattgcaattcgacaaaagatttggtggagacacagatcccagccatgtcacaggttaagaaggatgagggtggtactggcaagaaaggcctctctgattaaatgcatttgagcacttaagcagaggactgcaagaagcaagggagtgagctacgcagatgggagaggagagagaggaatgaggacaggagggaatattacgggaggatggatgacacgatgccctgagctggaaacacactgcaaggaagccagagtggctggagcaaaggcagagtggtggaagcaagagtagtcagagaagagtgaaaaaaaagggaggctgaggcagtcggcagttaatggaggggcttggaggatctgtagactttatttacttatttatttatttatttagagacagagtcttgctctgttgtccaggctggagtacagtgacacaatcccagcccactgcaacctctgcctcccgggttcaagtgattctcctgcctcagcctcccaagtagctgggattacaggcatgcaccaccacacccagctaatttttgtatttttagtagagacggggtttcgccatgttggccaggctggtcttgaactcctgacttcaagtgatctgcccccctcagcctcccaaagtgctggaattacaggcatgagccactgcgcccagtcatctatagactgtaaattatactctgagttgcaaagacactgaggctcttgagcagaaaatgacctattcaagaccagtttgaacaggatctttcctgctgtgtgaagaaaaggccttaggaagtaaatgtagaaggcagggaggccaaatggaagttatcacaaccatctgtggaagagatgatggtgaacagacccagggttattgaagcagagtttttgagaagtggcgaaatattgggtatattcaaacccaaaaagcccatagtttttcctgtttgattacatgaagagggtaagagacagaaagggaccaaaaatgactccaaggatttaggcctgaggaacaagaagaacaaagatatcatttgcaaaataggaaactttaaagtaagtgtaggttgggtgggctggaaaccaactctttgtttttggatgttgctatgatttggataatggtgtcttcttcaaaaatcatgtggaaactcaatccctaatgcaacagcatgaagacatgtggccttttgggaagtgattgagtcttgagggttccaccctcatgaatgggtttagcaccattataaaaggtctcaaggggaaggaagaactctcttgccctcctagtcttccactatgtaaggacacagtgttcctcccatctggaggatgcagcaacaaggcgccatcttggaagaaagagcagccctcaccagacaccaaacctgctaatgccttgatcttggacttctcggtcttcagaactgtgagaaataaatttctattatttataaattacccagtctgtggtgtccttttaatatcagcacaaaaacagatgtgtttgtttgatgaggtgactgttagattccagttgaaaatttcatgtaggcagtttggtttataaatctgagttcgggggagacgtccaagctggagcaatccatttggacctgtcagcatattggtgtatttcaagccaaaggactcaatgtgatcacttaagatgtaagtatggaaagaagaaaaaatgtaatccagacagaaggatatgtcttaaaattatataatcaataatattagaaacaagatgaagaagcagaagctgtatagtagaatggttaggcatagtcactcccagcattaggttaacccatgactctaagttattagagttaggtcagtattctaggactcttttcttagctatggcctgtgctagatttccatcaatattttgatgatcatataaaagatgtggttttcaaattggcagatgacacaaagaaagaaggaatataataaaatgtattacaaaatttaaaattactgaatactttgaaacaacaagcaaagccaacaagattaacgtcaacaagcataaaagtaaaattccaaacctaggtccaaaaggaaaatattgcaggccaggttccatggcttatgccagtaatcccaggactttgggaggtggaggcaggatgatagcttgaggccaggagttcaagatcagcctgggcaacataaattattctgtaatggtggaagtcagattaatgattgcttctggtggtgaatggggatgaggagattgattaggaagaagcataagggaactttgtagggtgatggaaatgttttttgtcttgccggggaaggtacataagtgtatacatttatcaaaattgatccaactgtcccttaagatctgtatatttcattttacgtaaattattactccattttcaaaaaaaaaaaaaaaaagaagaatggccccaaaagaaaatgtgtagatgctgaggatgtttagttgtgagaaaaataaataaattcaagggcagcagaagtttcatatactaaagtctgttatatgaacaaggaatgagacttactctacattgttctgcaaaataacactcaactgtaaactccatttctaagttgcagacacctctactacatattgatgtatttgtatatacacaccaatataccacggaatacccatcagccataaaaaggaacaaaataatggcatttgcagcaacttggagttggagaccattattcctttttttgttgttttttgtttcttaaacaatgtctcgctctgtcacccaggctgtagtgcagtggcacaatctcggctcactgcaacctgtgcctcccgggttcaagcgattctcctgcctcagcctcctgagtagtgccaccatgcccagctaatttttgtatttttagcagagacagggtttcaccatgttggccaggatggtcttaatctcttgacctcctgatctgcccatctcagcctcccaaagtgctgggattacaggcgtgagccaccacgcctggctggagacaattattctaagtgaagtaactcaggaatagaaaatcaaatattgtatatactcatttataagtgggagctaagctatgaggatgcaggggcataagaataatataatggactttggagactcagggagaagggtgggaaggggggtgaaggataaaagcctacacaatgggtatagtgtatacacagtgggtacactgcttcggtgacaggtgcaccaaaatctcagaaatcaccactaaagaacgtatctgtgtaaccaaaaaccacttgttccccaaaaactattgaaattaaataaaaattaaaaagtaaataaaaaattttaaaaacaaaatagcagactgcctcatacataagagtaggtattataaaatttttgtatgttttatttttaaaatcacatatacatatttatgtgtgtactaagcacaatgaaaatgtatgtcttattataggtatggtcagaaatgtatgaaagtcactaagctaaattatcttaacagtgttttaaaatattataaaactcgttatacctgaatgacgaacttaattgagaataagtgacagtaagtaactcttttctaaaggaaaacaaatgctttaaattagataccaatgacttttatgggatcatctcctatttgagaagatatcagttttttgcctcatagtttttttgctttctatatgtactttttggtactccaccaaatcagcaacatctgattgagaaaaaaggttaaatcttcacatcttgctaatgttgtgtataacttagattcattctttcctgacatttctgttaaagatacagttctttccagaaagaatccatttacatttatatttctgttacatgaaaaaaacttttttttttgtaaagccaagtgaaatagaaaatatgtaggtatggaatctttctaaatttattttcatagaggtagtcttagcaatttacacaaatttattttcttaggaaggaaataggatgaatagtgatcctccaccctacatctcataatttatacctgactgatccttgcactgcttctgaaccagtctcctcccttcactgaaagccacctatgcacccagggagctgagtgcacaaaggagggaatggtccaggtgtgggacctagaaggatgcgtaggagcccatggagtgaggaactagaggcacctgggtgaaagctcataagcatgtaaaagtattaacctgtttactgaaacaggtgattcagttaaaatgaggctaggaggatgggtcctaattcaatttgactggtgtctttataagaaggggatatttggacacacagagacaccacaggtgcaagtgcacagaggaaaagccatgtaacgacacagtgagaaggtagccatctgcaagccaagcagagaggccacagaagaaaccagacctgctgatgccttgatcttaagcctttagcctccagaactgtgagaaaataatttctgttgtttaaagcacacacagcctgtataactttgttatggcagccctaacaaactaatacacttccaatgaaagctttgttactatcccattttacggagagcaaacaacttacctgactgaggtcattgagctctaagcattgggacagtttgagcacggctttcttcacaccactctatcattcttaccttcagttctctaccaaccctatccggatcactgataaggtgggaaggaactggaaaagtttcactagagtccaaagtcaagctggcccagtgcggtagctcatggctgttatcccagcactttgggaggttgaggcaagaggattgcctgagcccaggagctcaaaaccagcctggcaacatagtgagacctcatctttacaaataatagaaaatttagccaggtgcctgtagtccctactactcaggaggccaaggcaagagtatcacctgagcccaggaggttgaggctgcagtgagccatgattgtgcctctgtattccagcctgggcaacagagcaagaccctgtcgcaaaaaaaaaaaaaaaaaaaaaaaggtcaagaccaaggcaatcctttggcgatattcacagactaagacttggcacattagatagatacctacagtcacatacacttttctactttcctgctaagaaaaggctctgaatctcatgtaggttttttctcctcttaatcaaagcaggtggaattagagtcacagattttcactaaaactttgcttcaataaattgtggttaattagtaagatttgctgcttcaacatgggtgatcagagatttgaaatagctcagagatgaatagtcaaattatatatatatattaatttttcacaaaaatgattcctcttccttgcagatttcacgttattccaggcccaagcacaagtattaagctaataagcagcgattcatttctatgagatgggcaatttcccctcatttctgatgatttattatttcgatctcgatttttaaatatatgttatcatattaaatgctggggaaatcacattttgcctctactactgcattaccagaaacgggagaaactttaataaaagttctgttgcgccacctagtggcgtgcattagaatcgcatcctttagaaacagcccccagttcagtaggaaaccagagacccagagataccaaaattgaaatgtaggtactacagtccgacaaggaaggcacaatatgtctatttgctgctctggtaattatgcagaacccatcccaacaggacacctcactgggatctttgactcattgtttgcgattctgtggcaaagagagcctgcaaaggctgtgacttctgtggacggaaggatgagaaggaagtgttttgtgtgtgagtgacagactgagccaagaagagaaccggaatggcagcatgctttctagcactcacatgcagatccccagcagtgacatcctacttatctgatatgtcatcacatatttactccacagggcctgaaatcagaacgtgagagtgagactacagtgagacttgtgtttcatttctaccaactttatttttaccctaatggtattagaaatgaagtattgttgctagacttttaaaaaatattttgaatagtgagtttataatctaaatgaactccattcaactatacatcctcagcagttgacctgtctaaagcactgagccagacatggagggctactgcccagctactgcagccatgttgtttctgccctctggagccctccgatagggaggggagatactaaataaatgagataacatacttggttgtaagggactcaaaacatatgaagcacttatatcagtacctggcatatagtaaattacatagttattattaaatggagaaataaaactgatgcaaccatgtgggagtttctacacaggtaaaatcagattcttcctgtggccctgcctgatcatagaaaaattgattagatcaggggtccccaccccagggccacagatcagtgccagtcggtggcctgttgggaaccgggcagcaaagaaggagttgagtggtgggtcagtgagagcagcttcatctgtatttacaaccactgctcattgctggcattaccacccaagctccgcctcctgtcagatcagcagtggcattagattctcataggagcagaaccctattgtgaactatgcatgcggggatctaggttgcacttgccttatgagaatctaatgcctggtaattcctcactgtctcccatcacccccagatgggactgtctagttgcaggtaaacaagctcagggctcccactgattctacattatggtgagatgtataatcgttttgttatatattacaatgtaataataaatagaaagaaaatgcacaataaatgtaatgtgcttgaatcatcccgaaaccatccccataactgcccatcagtgaaaaaattgtcttccacaaaactggtccctggtgccaaaaagactggggactgctggattagtttcatcctcagagttccgtctaactcatgacttcccactttgacccaaactcctagaaaattagaactattgccaattttcagagaaagtttgacgaagatgatttttactagtgttgcaaatattgactgtaagtttaggtctaatattacttagaagtaatattaaaaattatgacatcacagcactttgcaaattttttatcacatttgactttgctggtcccaacagctaccaatcagtatcatgcctcgcatagtcaatggcatgaagaactgaattcagaattccctgccctagtcatatcacctataacttacttgtttaatgagaatggggtttaaggtagaacaaagcacgtctttttgtaataagcaggctgagatggaaaaagccctgaagaccattgcttatacttgggagtgacttaaattcacagtgagttataaaatactgatgctatcttaagttctgtttcaaagaaagcagaaatgagcctagaaatggagaaattctataggactaagagggtacgcattccaaggaaacattttaccaactttacaattgtattcggagcttgccattattaaaagtggaatttcctgggtacaagaaccaccatctaacctatggctctgttgtgaatcaaaataacatttctcccaactccattcaaatctctaatatcctcattcaaatcggtaacacagctatacagcactgaatttctcattgtccaaaatggaataatttctaacagcttcattctatatgtcagcccatttttatttaccatccaacatgccctaaaccctgatgagacactaaggatacaagagtgaataatacaaacactttgatctcaagttgctccaagtgtagataaaaacacacactctggtgatactcttcctccaatacctaccgcatgtgtgaccttagagaaagtcgacaggcttcctgggactccagttcttatctaaaagccaggagtgatgaccatatattcattaatgccaggcatcagtgggaggctggaagaattaaacaggtaaggataagacagtaaaacatagtataaatattatgtactaatataatgttaatgttgatactttctcagttactctcactttatagaaaaaagagacatttacaaagcaatcctgtcttttcatacatcagaaaatttcctaactgtaaacaaaatggagctgggttgccgagagaaaaagccccaggatgtaattctttttaatcacacaataatgaagcaatgtatatctcaagaaaataatcattttctggaggaaaaaaaagaataataatagttctcaaacacattataaaatataatgacatcataatgcaaactttatttcactaggcctaaatccaaataagaaagatttagtcctaaaccaaagctgccccaaagctagtggcatcttttcataaagtaatcattaggggacaggatcacttaattggtgaaacttaaattctaagtttttactatatacagctgctaaattcagtttgcatgacttgatccatgtgctatccaagtatgttaataaaaagtcatatttagattggttcaaatgtttttctctgagaaaatccaagccgtcagctgaaagctatcgatgtaagtgcttgtgtgtattcctgccaagaaaagtgctaattgtttgcttatctatgttcaggcttgtctcctaggttggtctcacgtttcccattgatccgacttccttcactgctgctatctgtccctgagcccacctaaaggataaaaggggaaagaaggctaaacacatttctccacaaagggagacacttattttcttaaaatttaaaattaataaaaatgaaagttgaagtttcatcagttctccccaaacccattctccttcctccctccctaaggtggccactaagatgaccctcatctgaggatatcccgccactcctcatcttcaccattttactttatggtcatataaacataaactggtagtagtgtgtttagatttttgtaggtggaatcatactgaatatattctatattcagaccacactattggttgagtttaatcatatatttaaatatatatagtttattttaatctttattttcattttttagtcaattaatttatttttttaagacagggtctcactctgtcacccaggctagagagtaatggtgcaatcttggctcactgcaacctccgcctcccaggttctagcgatcttgtcacttcagcctcccaagtagctgggattacagtcacgtgtcaccatgcccagctaatttttgtatttttagtagagatggggttttgccatgttggccaagctggtctcaaactcctgagctcaagcaatccacccacctcagcctccaaaatctgggattacaggtgtgagccaccacacccggccgatctgtagtttattttaactactttgtgatattccaatctacaaatattcaatattttatctgcccatagattgacagtacgttgtttccaattttttcagtattgaaaaaaatatagtctaccccatggtatccacaggggattggttccaggacccctgaggaaaccaaaatctgtggcatagtatttgcatatcacctacccacatcctcctgtatactttaactcactatagattacttatagtaccaaatgcaatgtaaatagtagttataccgtatttttcgtttgtattttgttattgtggtattgctattttttttctgaatattctccatccacagttgtttgaacccgtggaggtggaatccatggatacggaggccaactgtgctgccacatttttaggatttcctctcatttggtcttgggttctgtcttgggagagtggctgtactccagccttgccctcacggggttccagaggatgagtggtggctgttcacagtgtgcctttcatgggatacttcttgatcccggttggcaacctcatgcctaggtggtcgaccatgaacagacatttctttcacagggaatttgtttatattggccgatgccgttgtggctttcgtctgacccgtgtccagtttattcctataagatagccactccctaggaaaaccctctactggaaaaaaaagttaggtttggatatgtcagtcaggcgagacacagaagcagcagcacaacaaaacccatgaagtaatagaagcattttcattacctacagatcccagacagaaaagggcagcacgcctcacagggccaatgggaaggggtaacactcgtgctcaaccagtggggagagagagagaatgggccaaagcctttttgggatccagggtgttacccagggaggtttcccaggggaagttctaacaggttggtttacagcaagcagacatgagttccatggggccttgctgtgactgacaggtagttactgtggaatatctgctcgtctacgtgggctctgggggtcagtggggcaattctagtcaattgcatccagctgtaccatagagcggtggtcaccaggaggcagtggtataaagcaggtatctggatcaaccacactgaggaactgggaagaggtagagaactggaaaccttgtcaagtgtgactgatcccacttccagtatgagaaagttaaacttatattcaaaattggtgccaaggcaacataaaattataagaatttactatacacacacatatttgtgtgtgtgtatatatacatatattctgattactgtggcagtatttctattttatatgtatataattatatataaattgtatataatttttataatatatattttatattatatattatatgtacatattatatatacatatataatttttatattatatatgtacttatatgaaatcagaattactgccacaggaaaacaatatttaaaatcactaatatttcccatgaatataacttaatatagttgggaattttcatcaaaatacattctgataggagttgttcaaggaataaaaatttcatttttgatttacaaattataattaaaaccttaaaaattagtgccaaaaattaaaattatttatatgaaaacgaatataagtgggtcttttgagatcttctatttctgatcatttacaatgtaaatcttctccatggacatgagtgactgagagttaccttcattgcagaaatattccagacatgtacatgttcaagaacttccaagcatatttcaagtggattttctttaccatatcaaagacacaaattttctttagtggagaagatccaaaaatcaatccaaagtctatttgcctttttctaagtgagttttaaatgaatcagaataccaatttctgaagtgaaattattccaaaatgatgacagcatttaaagaaattaagcacttgggacatttatttaatttttagtaaaaaagaaccatgccttttagaaaaaaaattatgtttgtaatttgctttagcaaatatggtaacctatcagacatagtaggactaaaacaaatataaataaaacgtgtatactttgcacaaagcaaatacatagcagccaaagaaaaggtaaatttccctctgcataaaaggggctttgtgcatctttgcaaatacaaatcatcctcatcctcaaatgattcaaattttgttacccaaatgagcactttcctggtgcttcccatctctcccatcccactcccaagcaaaattaactctctttatcttataagttttatggatatttgtggaatgttttatgacatgattatcttctaccatcaattacagcttttctgcttacttacaagatcaccccaactagacttactttctttcatctttaattcctccaaggttatcatacaaagccttgctcaaaacagcttctcatcagtatttgttagactgtattaagaagatatgtcttctggccttggcctttttttctatcctagagaagcaaaagctatactttctgaagtgatttttaaaaattctaacagcacattcatctgaatgcttctcaccaatggctacttggagatacttcaatcataaattattagcttgccttatcagtcaagcaaccctgaagtctaaatttcatatggatctaggtcaagtgtctgctactgaagctgttacagaaaactggtgattgctaaaggaatgattgtctgatccacaaattggaagcagaccctttgcttctcctttctctgccactgactctacaattagttcacagcaaaatcataattccctcaaggggtggacaggaccacccacaagaggaaagctgttacatgttagcagctctgagagaaaatgaaaaaatatatatttgttgaaagcaaaagattcaaaactactatgtaagtgagttttttgtagcacctaaagattttttttagctcatatagatatagttatttaaacagatgacaaatacagacctatagccaaacagtgtttcttacactattaaagtgaatatgaacaatcattcactcaacagatattgcttttgtatctattgtgtactttttttttccctgccttaagaagataattgagttggagaagaaagatagaccagcctgcaaggttaaataataatatctaacaatggtgtgaaacatgttttaagaaagaaaaatatctagcaaagattttgatctatgttggtcctaatatactaacaatctattattagtatattatcattaatagctatcattaagtaccacattaagtttttgttataagtaccatttttatccccattttacaggttaggaaactgaggatgagaggttacgtagcaatatgtagtagagacaggattcacacccaagtctatctgagcaagatctaaattcttgccattatactataggtattttttttctaaattttgagtcatgacatgtccatagccattggcagttaatatttttatgctaatgcagacaatatatattactgtttattttcattgagttttgaattcatttggaatattggcctttagttgtttctataagaattatttttctttttatatagggttgtgatacacagatgatttatgacatgttgctaagattgaaatccgttctctatttgcctggtgactttgtctgcaaaaaggtgagtgcatgctatttttcaaatgcacaactaataaatgcatttgaggatttcggacataagtcaagaacattgtttaaacaaaatttgttcagggtgaattccatagtatagaaataattatgatatatagctctgtacagcaataacgtgctctcagagttcacaaaggaacaagacaatatggatttcattacttatattataggatagaagtgtgggtagtctgagaaactgctctgtttaaatgttaattatcaatcgtcacagcttattaatttcaaatatttaaagtggaggaaaaagttacagaagcgataggtggttcagccttttttatgtcttcggcaaaatatcagttaccttcattttgctctcccaagtagtgaataatcaatgccacattttaaaaaactgtactgtgctttttatgattacaaaataatgcatgttcattattttaaaatagaaaacacataaaaacataaggacataaataccaccatccaataataaccactcttcatatattttggcctatctttttatactgactgatggatagataaagcttgtgctataaaagtggcatcatactgtacatatgttctgaaacatgttttgtcatgtaacaatatatcatatgaacactatgtattaagtaatctacaatatgattttttaaagctgcatgatgtttcagtctatggatgtatcaggatcaattttcaaatgtttgctattataaataaaaagaacatcccctcagataaatatttttgcatatttctgatcactaacttaagggagaggaaaggaatgatgaccctgggatttatatcatgacagactcaaccaaagataaactcaataatcaaaatttaaaaagaaaaatgagtagttcaaaaaatgcaagatgatccaacaccttggtgagttcacaagcgaacaaagatgagaggcacttttatcatttcaaaataatgtgttaaatgctatggtcaaagcaagcacacgctgttgtaagacacaaaggaggggcacctgtccttcctggttacggtaagatttcctagagaagatgatgtctgagctaagtcttgaaaaatgaattggagtacaccaagtaaaagaggaaataggtgttctgggtagaggaaagaatgtgagctaaggcaaaaaggaaggaactgtgtctatagagggagtgcagagaactataataaggtaaatgttagaacaattttagaatgatttattccacaaaactcagtaaatatttctcaatatgatgagccagaaacagtggagggcactgagcaaaaaaaagatggttcttgtcctttaggggcctacctttctagtgctgtggtattcaattcacagtgcacatcagaatcacctgaatgaagacgtctgggctccacccctcagtgactgatttggtctagatggaggccatataccagtattatttaaaactcctatatcattctaaaatgcagccaaaactgagaaccactggcttcatgcgagagacaagctataaacaagtgaaattaagtcaatacataattccaaaatgtgctaagttgtataaagggaaaatagaagttgccagaagagtatgtagtggcaaagacacttaatttagatccagggttgggagatggggaggttattaggttgtcaggagtgacctttgaaaaatctaaagataaatagttctttagtttaaaaaaaaaatgtggacaggatggcattttttatgaagacttggagccatgagctgagaggcaagatggagcttggcatatccaaggaacggaagcaagtgagtgatggagactgtggtgaacgacaaagtcaaatggagtatgaggtacttcaaggcatcaggtggagatgccaagtacacagtgaaaatcagtctaatgagagaggatggaactggggtttactgggaactgtaatataaaggaagcagacttcaagaaaagctcaaggaaaggtcagagaagagggccttgcctctaactttgaagagctctagtgtttgaagagatcaatgaagaaaagtcagagagagcaactgagaatgagctttcagagatgaagggggaaaatggaagagagattatgataaaatgggaagcaagaatatacaatcccacacaaattagtccaagttaaaagaaggcagattggtgatatgaaatcaattttattgaaatgggaaatacaagccatagtgcagtccaagaaccccttgggggcagtggtgtactgaaatgacatgactttaatgcaccacaacatgtcctttcatttggggccagtagcaacagagattgaaaactgtgataactcacataaactctagcacctgtgcccctaagcagtgcaaatttgtttaacaaagtatgaaatgcagagtagatgcagccttttcatttctaatttcttcttcacatcacattcatcactcaataacaaaaacatcagtggagacaaataaggcaggaaaaggaattaagtaggtgggagagtgcagggaccagccccacagggtcggtgggcttctccctgtgtgcggcgatgagagagtgtagaaataaagacacaagactaggagatagaagaaaagacagctgggcccgggggaccactaccaccaatgcgcggagaccggtagtggccccgaatgtctggctgtgctgttatttattggatacaaagcaaaaggggcagggtaaagagtgtgagtcatctccaatgataggtaaggtcacgtgggtcacatgtccactggacaggggtcccttccctgcctagctgccgaggcagagagggagaggagacagagagaaagacagcttatgctattatttctgcatatcagagacttttaatactgtcactaatttactactgctatttagaaggcagagctaggtgtacaggatggaacatgaaggcagactaggagcctgaccactgaagcacagcatcacagggagacggttaggcctccggataactgcgggtgagcctgactgatgtcaggtcctccacaagaggtggaggagcagagtcttctctaaactcccccagggaaaaggagactccctttcccagtctgctaagtagcgggtgttgttccttgacactttttgctactgctagaccacggtccacctggcaacgggcgtcttcccagacgctggcgtcaccgttagaccaaggagcccttctggtggccctgtctgggcataacagaaggctcgcactcttgtcttctggtcacttctcactgtgtcccctcagctcctatgtctgcatggcctggttttccctaggttatgattatagagcgaggattattataatattggaataaagagtaattgctacaaactcatgactaatgatattcatatataatcatatctaagatctatatctggtataactattcttattttatattttattatactggaacagcttgtgtcctcggtctcttgcctcggcacctgggtggcttgccgcccacaggagagtagaaacaaggagacgctagaatgacaagtcacatttctttaagagtggatttacatgatagtagatattgacagagaagaaaggctgttacttgacaggacttgagacagctgaagtcagctttgttttgcttatcgttttcacaaaatattgaaggcaaggggaaggaaaaaaatacgttcaatttgaggttatctatataatttaagagatgacagcatttggggccaagtttgctgacctacttaatccccaggatggttcagaaattgactgagtggtagcttgggctggttgaaagagtgggagttttcttcagatgctctatggcagggcagaaatcacctagagctcttgttaaagcaccaatttctgggacctcattcccaaaaattctgattcatatttctgcagtaagaactctcagtaaactgagaatttgcacctctaaacaagctcctagtgatgctgatgctgctgacccaggaaccacactttgagtagcactgctcttttctgttggggtgcccttgagtgtcataaagccctcatgagccttagaaatagcttcctacacagaaaccctgaaattttgaagggcgctatctccaggggttacctcactctacatgaagctcttgttttttcatactttctccaaattagtccacacgctaacaaccagagcttggttcaatcttattttgcacatgctgtcagcccttattctctgaggaatgtctacttaatttgaatgctaattaaacttgcagaaaaggcttaaattagcctagaaatatgcaagaaatagtggaagttttggttcgttgattatgccagatctccttggaaaattattgaaatgatcattaaaaaataattaaaagagctgaactgtatttaagtacccactatgtacttctacctccagtcagttgtaataactgcctttgaaaaatcattccagttccttgagaattacttcacgcaaagaataaggaatatgaccctgtcctcatcattacttcctaaagtatctcttggaaaactaattttcagatatctttccttattttttaattcattcatggctatttcattggtttttaagagatcagttctgatattggagtcaccgttagatgtggtctgtcttcatgtattatatagagtcagatgacataggtgctgctagttctggcgctgtcacctgcgagccttataagtttgctcaagacacttaattttttaaacctcgactgccaattgttaaataagagtaatgatacgtttcctacttgacttcactcggatttttgcaagaattagatgaattaatatctatgagatgctttacagctataaagtagcatgttctgctagaacaaatataggaattaaaataaggagctatgtaaatgtcagataatgtaatgattttttaaagtaatatgcaaagacatgatattgttattagcattaatagtatgtaaataaatataagatccatctatattggaatttctacttttatctgtttttgagtataaatatatgcttaatattttgcacaggccaggtgcagtggctcacgactgtaattccaacactttgggaggccaaggtggcaggatcacataagtccaggagttcaagacaagcctggacaacatggcaaaaccctgtctctacaataaatacaaaaattagccaggcatggtggcttatgcctgtggtcccagctactcaggaggctgaggtgggaggatcacttgaacccaggaagcagaggttgcagtgagctgagatcatgcccactgcactctagcctggggaacagagcaagaccctgtctcaaaaaaaaaaaaaaaaaaaaaccaaccccaaaattttaatttaaaaatgtattttacacaatgcaaaacttaaacgtatttcttgcattgctcagttaggagatgtgggttctaggcttccttcgcttctaattaccgagtcatataactttagctaattggctaagccaatctgtgcctttgttttaatttttgtaaaaaggaaataatagtacttactctaccttccttataagagtaatggggagataaaataagaatttcagcttcctggatgttaactaaaaggtggagtctgataactttaaacacaacccagcaattataaagcaacaatagttgatgttcaggaaaataaacctaggtgtaaggaaagactttagaatctcccagagaatagttaagttatattttcctcattcataaatgagtgtttcctatatgtcaagcctgcgttcagcactgcaacaaagtagacattctctcagccatctcagagagtaaactacaatcaatatttttttcttccaaagaatgatgtaggctaaatatttttaaaaataaaaaataaatcttttaatctcgagttgattttagtgtattctaattctttcaaagtatggttaatgagaatatttgattaactcaaataacccagtcccctcctaagccaagtaagtgaatttattgtattaatgctatttttttttatagctcaaggtgatcaaggcactgctcattcagacatgtaggtactactagccaaatagtttgcctagtgttatgcaatctggcctatttagagtttaacagcctttcttgacctaagtgccatttaggtctcttgtaagacatctattctttttggaagttagagaagatgtgttccaagggcctcataaccacccactagtttggtgatttacttgtaagaactcatataattcaacataaagttatatttatggcttaagatttattatagcaaaggataaaatgcaagaatagcaagaaaaagatatacatgggcaaacacgagagaaatcagacacaggcttactaggtcctatttctatgagggtcacatggatgcatttttctctccagtggaccacagaaacatgagcaaaatatctccaccggtggaagctcatattagtcttgggtccaatgttcttaaatggcgcatatagctgcatgaccagacatgattcagactttcaaactatgtacaaggtacacatcataaatctttgtgattatattaaatagtgttgacagcctgatacatcctgctatactggctcaggaatatagaataacaccattaaccagtggctatgtgaacattccaggagtttaattcttagggcttgaacaaagatcattgccctggtcccaagagtccccaaagataggcaagaactgagtaaaacaacctgctgcattaatactttatctcagtatggaatactaataataactcaaagatctcctatgccccaattccccaaatcagacctcaatgccatgggtagatgaatagaattgacctttgaaaggctgcagtctatgctctttggctagaccaagcaacttcttccaagcatagtggtggtcatcaaagccaggttcgaccatgcttaaaatcaattacttcctctacccagggtccttcctaaagcaatgtgctaactgaaatatcttcatgtatccaagggaggcaaacagtactcacgtgttgagaagtatcatcttcctaatcattttctttcacatgatatgttcaacccatgtctgtaaatactttaggtcttaagataattaattttacactaatgttctttgcttccttcatttatatttactcctctaaaagaatttatatttcttaatttacagcataattatcaagaataaagtaactaccatttcctctttatatttaaaatgtagggagaaattggcaaggaaatgtatatcatcaagcatggagaagtccaagttcttggaggccctgatggtactaaagttctggttactctgaaagctgggtcggtgtttggagaaatcaggtatctgaaagatacttcataaatattgaagtccatcatttgtcataaaagaaaagtcttaggtagtaaaataagttcccgctcagatttatcaaaggtttgattgtgctgagagcattcgtaaaataaggattttcatatttttattcatcccttcaccaaagcgacctaaggaaaagaactgggtcattcagctctttagtccaggacctagagcagtgcctggcgtaaagcaggttcccagtatatgttgaatggatgtgcaaatgaattagtaaatgagagaagaggtttggagggttcattgttaccagattgttggaaaacttgaaagccttgctaacaagggggtcttgcgtaggctagtgatgtgatcatagctgtgggaccaaatttcctgagtttaaactccagtttcaccactactggcttttttcctctgttacttgtccccactgttcctcagtttcctcaccttaataattaggataataatagaacatatcttaaagtgttggtaaatgagttaattcactaaaagcacttagaacactgcctggcatctattaacaactcaataaatatcaattatttttaccattgcttcttattggccaggaaaagtttatcctagaacaagaaactccccaagaggaaaaatatagacagcaaatttaagcattttgtgagctaaacacttctatatgcattatcacatttattcattattcaaccaaaaaatatttatggagtgcctggtacgtgctagattgtcaggtattgctcttaactctaggaataaactatataaaaatattagacaagatatggcccctaacagagtttatagtccagtcagggaaaactgataataaatagttaattagctagacaagatgaattcacactgtaataactactatgaaggaaaaagtggttagaaagtaacaggacacaacttagatgcagtggtcaggaatgacctctctagggagataatatttgacctgagatttgaaagagaaaaggatcagccattcagaattgggtgaagagcctgattaccaaagggctagaggtaaagcaagtttgtctggtcaaggggtagaaaggtcaatatggctggagtacagtgaataagaacactggggagatgaagccaaataggtgagcaagacccagataacatggtcttttacgccatgataggaatttatgtctttttctaaatatgaatgaatgccagtagagggttttaggcaaaagaatgacacactctgaattattattttaaaagacgacttcaacagctatgtggaaaagatacagtagaggagcaagaatgaatagagtccagttagaagtcaactgtggtggctcaagtgaaagatgatggtgtctggaactgagatactggctcatatgatgaatagaagagtaccctgtcaggcagttattaatatattcatttcataactgagaaaattgctatcccaagatgccaagtactatatctttcccaggacaccattgctaatgaattatagggacaacattcaaacctgggtctccacggatcggggtccagtgatctttataccacgtcacagaagaaatttccagtctctaatttcctagctgctaagaagttatctttgtgttctggaaatatggataattttagatgacttcatattagcattgttagggtttctttggaatgttgaaacatgttatttctctgttgttaatgtggcttctctttttaatttttttctccttgtttaacgactgattatttgttaaggtgatcctctgaggatcttgctcttgggcagtggtggaaacacttctcagaacatacgagacctgagttctttgcctgttttctatcatttccttcctgggagtccttgcaaaagtgatttaatattttgtgacttaataatcactgtaatcttcaaggtcataaaacatgcaacagtttaatctgaaacactgcagaaattaattagctgacctttcccaagggttgagtactccctgaagaataagctttataaatacaagtatgttaattgctgatattatcatcacaggaggaaataccctaagaattgaatccaggtgtttctgagttgcaactgaaagtaatcctagattcctgacagcagcttctcaaataaatctcctattacccatttggtttctaaggccaaattgaaaccagtagaacagacaaactttaaacttgctcagtagtttggttgattcaagtaaaagggagctttttgccttgattctctttttggctgtggttatggggaaacaggatgcatctgcctctttccagatacccacaggcttcacaggcccacagctgtcatatgccgctgaagctctagtcatttattccagagctggaggtatgcctgccaaacatccagatactggaaagatctagtaatagtgtttactactcaaaaatgctgtgacctttgttaaaatgagctaaatccagcactatcatgtagcctttaaaagagttctttttcctcaggaaaaaaaaaaataaagaaaaacattaagggctttcaaggacattatatattaatccaaaagagcaaaaccctgactaaaatatagattaatagcctgtcattgagaaaacccagaccacatttccaattatcatctgaagagtgcagataccccatttctaaaagagagacccagggtctgctgagagatggccttgtggtggttccaggtccatcattttccttacacgtacatttagtcccaagtcttattcactgaatgtatttaaccacttcctgtctgcattctgtttctgttaaaatgtcatttttcttaaaacacatctgagtttttattcttgtgttgccattatgatttcaataggattttctattggtttcatctctcttcggaatatcctcccctggaaatttttcattcctccttcaaatgccacctttttgaagccatctttaacccctaaaacaactagttactctttattctatgcttccatagcatttcattcatgcatttattgcagtaattactactgatttataattaatttgttcagacaggtctctccaacagactgagctactaaaatgtaagaactagaggctgggcgtggtggctcacgcctgtaatcccaacacgttgggaggctgaggcgggtagatcacaaggcctggagatcaagaccgtcccagctaacactgtgaaaccccatctctactaaaaaaaaaaaaaaaaaaaaaaaaaaaaaaaaaaattagccgagcgtggtggtgggcacctgtagtcccagctactcgggaggctgaggcaggagaatagcatgaacccaggaggcagagcttgcagtgagccgagatcgcgccactgcgctccagcctgggtgacagggcgagactctgtcacaaaaaaaaaaaaagaaaaaaaaaaggaactagaatttatccatcttcatatcaccagcagctacgtaaacactatatactaagtggtgatttttacttgtatcatgcctccattcaaaaataatttgcaacagctcttcagcaatttttaattaattaagtacttaattgtgatttgatagaaacaaaagaaaattatatttgggtccccttatggcatagtgtgaaagtgactcaaagaaggccatgtattccttctttgccaggcacagtgccagtcatgagggtacaaaggagaacaagaaacaatcactgtcctccagggccttagaagagacttcaataccaggtgattaaatgtatgaattgtgtcccaggaagagagtgtgtacaggatgctttggggacaaagttttcacaaggaccagtgcatcctttggatctggcaattactagaggttatttgggaaccaaaagctgaacgtttatcgggcaaaatccacccccgatatttcatgtaggttcttttctattttccctaagtgttggctggtctgagaaataaaggaacagagtacaagagagagaaattttaaagttgggtgtccaggggagacatcacatgtcaccaggttccgtgatgtcccacaagccacaaaaccagcaagtttttattagtcattttcaaaaggggagggagtgtatgaacagggtgtgggtcacagagatcacatgcttcacaaggtaatagaatatcacaagccaaatggaggcagggcaagatcacaggaccacaggactggggtgaaattaaaattgctaatgaagtttcaggcacgcatggtcattgataacatcttatcaggagacagggtttgagagcagacaaccggtctgaccaaaatttattaggtgggaattttctcgtcctaataagcctgggagtgctataggagactggggcttatttcaaccctacagctgcgaccgtaaaagacagccgcccccaaggtggccattttaaaggcctaccctcagggacacattctctttctcagggatgttccttgctgagaaaaagaactcatcaatatttctcccatttgcttttgaaagaagagaaatatggctctgttccacccggcccactggcagtcagagtttaaggttatctctcttgttccctgaacattgctgttatcctgttcttttttcaaggtgtccagatttcatattgttcaaacacacaagctctacaacaatttgtgcagttaacgcaatcatcccagggtcctgaggcaacatacatcctcctcagtttacgaagatgatgagattaagagattaaagtaaagacaagcataggaaatcacaagggtattgattggggaagtgataagtgtccatgaaatcttcacaatttattttcagagactgcagtagagacaggcataagaaattataaaagtattaatttggggaactaataaatgtccatgaaatcttcacaatccacgttcttctgccatggcttcagccggtccctccgtttggcgtccctgacttcctgcaacaaaccttcactggtcctcaaatgatgtgtgcacacaggtcagtcctataaacccctactgaggggtatgtaaaggataattgacgtgatgcctgtagtgggttgaatggtgtctcccacaaagataagtccacatcctaatcctaggaacttgtgtatgtgacctaacttgaaaaaaagggtcagggtctttgcagatgtaattaagttaaggatctcaagatgagatcatcctgaattatcttgaagggccccaagtccaatgacaaagagggttctttttcctaaggacactttttataagtgtctttataaaagacataagaggagaagaccatgtgaagactgagggtagaaactgaagtattgcagccatagccaagaaatgcctggcagcactagaagctggaagaggcaagaaaagatttttcactggagtctttagaggaaacacagccctgctgatattttgattttggacttctggcctccagaactgtgagataataaatttttgtggttgtaggtcagttgttttgtgataatttgttatagcagccctaggaaactaatacaataccaaattatttaaattgttcactttcaaaattttactggggataaacaaaacatgcttgacactctacttcaccctacatggacactccgccttcaacacctgtcaatcctaccaccaaagaaagtcacaaatcatttgtatcttatgttctccactgccactacttcagttcatccatctctcactggacaactgcagtggcttacttcaagtcactcaaatccaataaccatatcctccacaatcagtctccactctgcagccagagggatcttttggaaacacagatctgatcatatcactgccctcccacttaaaaccatttaatgttttcatgccatttttagggataagaacaaagtgattttccttacctatgagatcctgtagagtctagcccctgcctacctctctacttcaggttgcacctgactcgccttgctctctttattttattttattttaattttattttattttattttattttatttatttgagatgaagtctcactctgtcgcccaggctggagttcagtggcaccatctcggctgactgcaacctccacttcccatgttcaagtgattctccaacctcagtctcccaagtaactgggattacaggtttcgccatcgtgcgcagctaatttttgtatttttgtagagacggggtttcaccatgttggccaggctagtcttgaactcctgacctcaggtgatccacctgcctcggcctcccagagtgctggattacaggtacaagccactgcgcctaaccatccttgctctctttaatccagacacccattgtcttcccattccttgaatgcaccacactctatccagtcacagggagttttttgcacattctattacctccgcctggatgctttccccacccttttaccaagatctcagcttctttcaggccttcctggattccccactatagggacctccgaggtctccctgctgtacactttcatccaatgatgttcctttcttttggagcacttatctttgtaactatacatgcattagtgcatttatttcttcaatgtttttcttccttcctaaattgcaagcaccagaactaccacctatggctgtgccaaatgttctctgcaccagaatgtccaaagaggaaccgggagggcaggaacccagttctcactccacttctgagccatgagccctggctgttgtgctccctctcatgcacagttacctttcactctgtgaaaggaggcattcttctagccaagcacaggactgcacatgcttagaaaagccacattgttttttattatactttacgttctggggtacatgtgcacaacatgcaggtttgttacataggtatacatgtgccatgttggtttgctgcacccatcaactcatttacattaggtatttctcctaatgctatccctcccccagacccccacccccgacaggccccagtgtatgatgttcccctccctgtctccatgtgttctcgttgttcaactcccacttatgagtgagaacatgtggtgtttggttttctttccttgtgatagtttgctgagaatgatggtttccagcttcatccatgtctctgcaaaggacatgaactcatccttttttatggctgcatagtattccatggtgcatatgtgccacattttctttttccagtctattattgatggacatttggtttgattccaagtctttgctattgtgaacagagcagcgataaatatacgtgtgcatgaaaagccccatttttattgtttgcatgaagacactttacacaggcaccaaggggtcctgctagacaccatgtgtggtttgttctatactctatccccagcccttagggcagtggctggtccacataagtgcctaataaatagttattgaataaataagtgaatgtaattatctttctatctttgtgaatgtacaaatgcacattcatttttgtcgtgaatatgcatattcagccttgtgccctttttgtcagttttcattataagaataacactgctatatttatctttgtaaaattactttgttttattttatttatttgaggtttaattcccaaaaatcggaataagtaggccaaaaggtagaagcatttctataactcttgtaatatatgggcagattattttccagaaaaaaattgaaccaatttgcattacaaatcacaatgtatagctatttttcttcagtattactgatattactttattatccccattgccattgcattttaataggttattttaatttgcagttctctaaatagtgcctggaaataatagttcctccataaatatttgctaaatgaattgatttcctatgggcccatttattttcataaacgtgatcatttaccttctgcatttctttcattgttcaccatccttttttcatcacagataacaagttattgagtagaattcaggcattgatatattcttgtatgttttagatatctggttgccattcaaaacatttaaatgctgtcttttcccctattacattagtcaaatcacctatttgagaatttctttctgatatttactttatatcaatgtgaaatggcgaaatattttgacaaatcatcttaaaactccttttaacctttaaatcattattgtctatttcttctgaatactcagtttttaaaattggagtaccagaggagacttttaggtctttggactattttaattccatattcttactcttcatcagaataactcagttattccttttttcctctttcctaaaaagtagaaatagtagatacaataggagattaaaagtatgagcagagataagactcgattaatactgaaagagaaaacttcattttcatttttttcatatctcaaacctgtaagcactacctgtgttaagagtacatatttacattttcactacatccttttgaatatagtctctttgattgtatagcacctttttgcttagcatgaaaagtatacctcatctaagtcccacaatatcccactgaacaaatatacaatcagtgtcattgcttaaatattcattcaaatatcctcaggattcctcctaaagtaactttatccagtgctaaatcaaggctttttgccaccatttggaagagcagagaggaagtaaagattctgagagtcataccttgacatgtcttatcacaccagcctgtttgggttcctcccttatttttcctaatatccaggggcaaatctgtatcattaaaacaacagcagtaacttcattggcatcactagagttatggttaaagaaaagacctcttgacttgaagtcaggtattgtcttagattttaatttcagagatgaaattcttaaatatttgttcttgaacaattcacttaactgattctggacctcagttccttgtctgtaagtataggttaagaacctacctcaccagctgggtgcggtggctcacgcctgtaatcccagcactttgggaggctcaggtggcgggatcatgaggtcaggaaaccgagaccatcctggccaacatggtgaaaccctgtctctacttaaaaatatatgtatatatatacaaaaattagctgggcgtggtggcacgtgccggtaatcccagctactcgggaggctgaggcaggagaatcgcttaaaccagggagtcggaggttgcagtgagccgagattgtgccaccgcactccagcctggtgacagagcgagactccttctcaaaacaaacaaacaaacaaacaaacaaacaaaaaagctgtctaaagccaggggcaagcgggaggctgggcctgcagacatccctcagcaggtgtcccagtcagggacacactcgctgccctgcgctttgcatccctctcagggtgaaggtgacagtggacccagacccttccctggtctaccgacctgaagtggaccaagaggctgccaaagacaaggctggcttccagagctacgtgtcgggtcccctcctggaccacgtctttaccaccgacaagctcatgaacatgcaccacacagtggatttcgtcaggagcaagcacgcctggtttggggacttttcctacaagaaaatgaaggtcatggaggccgtggacctgctgcatgggctggtggacgaatcagactcaggtgtagacttctcccactccttccaagccttccagatggcggagggcatccgaaagctcacccaggcaaggactggttccagcttgttgggcttctatgacctagggaaggtcttggccctgttgggggagccccagtgggtgatcgttggagacacattccccgttggatgctgtccccagacctccgtggttttgtaagtccacttttcaggacaatcccgacctccaggatcctggatacagcacaaaactgggcatgtattagcttactgtgggcttggcagggtcctcatgtcctagggccataaggagtacttgtaccaggtgatgatgttcaacaagttctcgctcccactggaggcttcctacaggatccgattccactccttctgcccctggcacacaggcggtgactaccagcagtggtgcagcaagcaggacctggctatgctgcccggggtccaggagttcaatttgaccaacttccctgacctgacagatgtggacaagctgcggccctactaccaggggctcattgataagtactgccctggcatcctgagctggtgacgcttcttccacccccaccactgctggacgacaggcctggccctcagcgtgcctagtgaggtctggctgtgggcagacagacaccattagggtccacctcagtggggaaccccactcgccccttatagccaccacctctcatggccatttgtacctagtggcaataaagacctcgaaggagagagaaaacaaaacaaaacaaaacacctagctcaccaaagtgatatggtcattacataggaaaataaagggatttacttttaaaaaaaactttaaaactataaactttgtacaaatatttcacatagttacctggttttcactccaaagaaacatttagttaggctagtgtattagtataggcttctttgatacagtattttccagccaaagtaccatagttaagtattcttctgggaaactcgaaggaagataaataaacagagcatggaataaagagtccacattatcctttttctcctctttccttccttagaagttatacccagattcttcatcgctcatccacttctctaaggccaattcagttctgaaatcaagacctgctaaggggaaaagggactaagcattttatatctgtaatatctaaactctctaattttgttaaaaatctgtatgtgcagacattcctcaaaatgttttacagaaaaaaaatctaggctaacatgtgtttgccattcagtacttttatgaatatcaaagtatctgcaaagatcaaaaatcccaggcagaggtggccttagaacatcctctgatatttgcctagccataaaagttttgctagaatttatttttagtcaagttttaaagttgcaaggaataaagtgtttcctaataatgttgacaaagatgaaaggatatctcagaaaaagtctacacaggttatctaacctcatgtttccgaaataaaacccagttagaaatttccttaatgagaacaaatatttggagttttaatcccttactcagcattgaatatgatgttctttccattgatagcatgtagagttatatatatatatggaaataattctacatgagaaaatgtatttagaccagaaccttctttattttaggaaatattttcatttcttacaattattaaagcattaatcattctaaattgcatctgcttaagaaggctgcctgattggtttgcatccatgtgccacaacttatgagctatgtatctccaggcaagttactcaactgagacttcatttcttcatcagtcaaaatggagaaacactaatacatgaccacctcacaagattgaaaattattatgtgtattaaaacataaaaaagaacttgggaaaatatctcgctcatagtaagcactcaataatattatctattggggaggagccaagatggccgaataggaacagttccagtctacagctcccagcctgagcgacgcagaagacgggtgatttctgcatttccatctgaggtaccgggttcatctcactagggagtgccagacagtgggcacaggtcagtgggtgcgcgcaccgtgcgtgagccaaagcagggcgaggcattgcctcactcgggaagcgcaaggggttagggagttccctttcctaatcaaagaaaggggtgacggacggcacctggaaaatcgggtcactcccacccgaatactgcgcttttccgacgggcttaaaaaacagcacaccacgagattatatcctgcacctggctcagagggtcctacgcccacggagtctcgctgattgctagcacagcagtctgagatcaaactgcaaggtggcagcgaggctgggggaggggcgcccgccattgcccaggcttgcttaggtaaacaaagcagcccagaagctcgaactgggtggagcccaccacagctcaaggaggcctgcctgcctctgtaggctccacctctgggggcagggcacagacaaacaaaaagacagcagtaacctctgcagacttaaatgtccctgtctgacagctttgaagagagcagtggttctcccagtacgcagctggagatttgagaacaggcagactgcctcctcaagtgggtccctcacccctgacccctgagcagcctaactgggaggcaccctccagcaggggcacactgacacctcacacggcagggtactccaacagacctgcagctgagggtcctgtctgttagaaggaaaactaacaaacagaaaggacatccacaccaaaaacccatctgtacatcaccatcatcaaagaccaaaagtagataaaaccacaaagatggggaaaaaacagaacagaaaaactggaaactctaaaaatcagagtgcctctcctcctccaaaggaatgcagctcatcaccagcaatggaacaaagctggacggagaatgactttgacgagctgagagaagaaggcttcagacgatcaaattactctgagctacgggaggacattcaaaccaaaggcaaagaagttgaaaactttgaaaaaaatttagaagaatgtataactagaataaccaatacagaaaagtgcttaaaggagctgatggagctgaaaaccaaggctcgagaactacgtgaagaatgcagaagcctcaggagccgatgtgatcaactggaagaaagggtatcagcaatggaagatgaaatgaatgaaatgaagcaagaaggaaagtttagagaaaaaagaataaaaagaaacaagcaaagccttgaagaaatatgggactatgtgaaaagaccaaatctacgtctgattggtgtacctgaaagtgatggggagaatggaaccaagttggaaaacactctgcaggatattatccaggagaatttccccaatctagcaaggcaggccaacattcagattcaggaaatacagagaacaccacaaagatactcctcgagaagagcaactccaagacacataattgtcagattcaccaaaggtgaaatgaaggagaaaatgttaagggcagccagagagaaaggtcgggttaccctcaaagggaagcccatcagactaacagcggatctctcagcagaaaccctacaagccagaagagagtgggggccaatattcaacattcttaaagaaaagaattttcaaccaagaatttcatatccagccaaactaagcttcacaagtgaaggagaaataaaatactttacagacaagcaaatgctgagagattttgtcaccaccaggcctgccctaaaagagctcctgaaggaagcgctaaacatggaaaggaagaactggtaccagccgctgcaaaatcatgccataatgtaaagaccatcgagactaggaagaaactgcatcaactaatgagcaaaataaccagctaacatcataatgacaggatcaaattcacacataacactattaactttaaatgtaaatggactaaatcctccaattaaaagacacagactggcaaattggataaagagtcaagacccatcagtgtgctgtattcaggaaacccatctcacatgcagagacacacataggctcaaaataaagggatggaggaagatctaccaagcaaatggaaaacaaaaaaaggcaggggttgcaatcctagtctctgataaaacagacttgaaaccaaaaaagatcaaaagagacaaagaaggccattacataatggtaaagggatcaattcaacaagaagagctaactatcctaaatatatatgcacccaatacaggagcacccagattcataaagcaagtcctgagtgacctacaaagagacttagactcccacacaataataatgggagactttaacaccccactgtcaacattagacagatcaacgagacagaaagtcaacagggatacccaggaattgaactcagctctgcaccaagcagacccaatagacatctacagaactctccaccccaaatcaacagaatatacatttttttcagcaccacaccacacctattccaaaattgaccacatacttggaagtaaagctctcctcagcaaatgtaaaagaacagacattataacaaactatctctcagaccacagttcaatgaaactagaactcaggactaagaatctcactcaaaaccgctcaactacatggaaactgaacaacctgctcctgaatgactactgggtacataacgaaatgaaggcagaaataaagatgttctttgaaaccaacgagaacaaagacgcaacataccagaatctctgggactcattcaaagcagtgtgtagagggaaatttatagcactaaatgcccgcaagagaaagcaggaaagatccaaaattgacaccctaacatcacaattaaaagaactagagaagcaagagcaaacacattcaaaagctagcagaaggcgagaaataactaaaatcagagcagaactgaaggaaatagagacacaaaaaacccttcaaaaaattaatgaatccaggatctggttttttgaaaggatcaacaaaattgatagaccgctagcaagactaataaagaaaaaaagagagaagaatcaaatagacacaataaaaaatgataaaggggatatcaccaccgatcccacagaaatacaaactaccatcagagaatactacaaacacctctacgcaaataaactagaaaatctagaagaaatggataaattccttgacacacacactctcccaagactaaaccaggaagaagttgaatctctgaatagaccaataacaggatctgaaattgtggcaatattcaatagcttaacaaccaaaaagagtccaggaccagatggattcacagccgaattctaccagaggtacaaggaggaactggtaccattccttctgaaactattccaatcaatagaaaaagagggaatcctctctaactcattttatgaggccagcatcattctgataccaaagccgggcagagacacaaacaaaaaagagaattttagaccaatatccttgatgaacattgatgcaaaaatcctcaataaaatactggcaaaccgaatccagcagcacatcaaaaagcttatccaccatgatcaagtgggcttcatccctgggatgcaaggctggttcaatatatgcaaatcaataaatgtaatccagcatataaacagagccaaagacaaaaaccgcatgattatctcaatagatgcagaaaaggcctttgacaaaattcaacaaccttcatgctaaaaactctcaataaattaggtattgatgggacatatttcaaaataataagagctatctatgacaaacccacagccaatatcatactgaatgggcaaaaactggaagcattccctttgaaaactggcacaagacagggatgccctctctcaccactcctattcaacatagtgttggaagttctggccagggcaatcaggcaggagaaggaaataaagggtattcaattaggaaaagaggaagtcaaattgtccctgtttgcagatgacatgattgtatatctagaaaaccccattgtctcagcccaaaatctccttaagctgataagcaacttcagcaaagtctcagtatacaaaatcaatgtgcaaaaatcacaagcattcctatacaccaacaacagacaaacagagagccaaatcatgagtgaactcccattcacaattgcttcaaagagaataaaatacctaggaatccaacttacaagggatgtgaaggacctcttcaaggagaactacaaaccgctgctcaaggaaataaaagaggatacaaacaaatggaagaacattccatgctcatgggtaggaagaatcaatatcgtgaaaatggccatactgcccaaggtaatttacagattcaatgcaatccccatcaagctaccaatgcgtttcatcacagaattggaaaatactactttaaagttcatatggaaccaaaaaagagcccgcatcgccaagtcaatcctaagccaaaagaacaaagctggaggcatcacactacctgacttcaaactatactacaaggctacagtaaccaaaacagcatggtactggtaccaaaacagagatatagatcaatggaacagaacagagccctcagaaataacgccgcatatctacaactatctgatctttgacaaacatgagaaaaacaagcaatggggaaaggattccctatttaataaatggtgctgggaaaactggctagccatatgtagaaagctgaaactggatcccttccttacaccttatataaaaatcaattcaatatggattaaagacttaaacgttagacctaaaaccatcaaaaccctagaagaaaacctaggcattaccattcaggacataggcatgggcaaggacttcaggtctaaaacaccaaaagcaatggcaacaaaagacaaaattgacaaatgggatctaattaaactaaagagcttctgcacggcaaaagaaactaccatcagagtcaacaggcaacctacaaaatgggagaaaatttttgcaacctactcatctgacaaagggctaatatccagaatctacaatgaactcaaacaaatttacaagaaaaaaacaaacaaccccatcaaaaagtgggcaaaggacatgaacagacacttctcaaaagaagacatttatgcagccaaaaaacacatgaaaaaatgctcaccatcactggccatcagagaaatgcaaatcaaaaccacaatgagataccatctcacaccagttagaatggcaatcattaaaaagtcagaaaacaacaggtgctggagaggatgtggagaaataggaacacttttacactgttggtgggactgtaaactagttcaaccattgtggaagtcagtgtggcaattcctcagggatctagaactagaaataccatttgacccagccatcccattactgggtatatacccaaaggactataaatcatgctgctataaagacacatgcacacgtatgtttattgcggcactattcacaatagcaaagacttggaaccaacccaaatgtccaacaatgatagactggattaagaaaatatggcacatatacaccatggaatactatgcagccataaaaaatgatgaattcatgtcctttgtagggacatggatgaaattggaaataatcattctcagtaaactatcgcaagaacaaaaaaccaaacaccgcatattctcactcataggtgggaattgaacaatgagatcacatggacacaggaaggggaacatcacactctggggactgttgtgtggtggggggaggggggagggatagcattgggagatatacgtaatgctagatgtcgagttagtgggtgcagcacaccagcatggcacatgtatacatatgtaactaacctgcacaatgtgcacatgtactctaaaacttaaagtataattaaaaaaaaatttaaaaaaaaatattatctattaatgttactattacaatattcttagtagtaataatatttgctaattggctatctgcatacacacttaccccatgcctagattacaaacagcttgagggcaggtgttaatcatctttatagccccagaagttggcagagtatctagcccattgtagagtatgctatttctatgtactcctaatttatctttttccttttcttttccatttatacagtgaattctttatcttcccttgcatgattgaccttcaaagcacaatcatctgtacaatcttggatgcatccaaaaaagtacttatcaaagcctctctgagaaagacaaatgtttaaaacagattatttgtttctctgaatattctaaatgtataccattgatcatgtctgagcaacaaagagagagctgggtatctgaaatgcattgtactgacctatctccttccatccataaacttactcttactgaactttacttgaaagtgattcatagcctttactgggggctctattacaaatgctcctagcaagcttattgttgtgtctatcgcaagaatatgaagttttctaccactttgcagaatggcccctttactaagcccttcaggagatatttctgcctgtctttaagccaactctggatccatttttatggtacagaaggcttacacctaaatttgaagccccactgtgccaaagtgttcatttttttatgaattccattttatgtccccattcttgtttttgttttgctcctacattcaatttatgctcttttgtattctacttttccttgtgagttctttctggatacagtagctctactaaaaagagctgtgcaggttgtacactgcacaactccagagggctccaatcacattacagtttgtatgcaatgtgtaatctacatgtggcagccctggacaaagcttggaatggatgactgaccagggactatcttaatattctagctctgtctgaaaaaatatataaatatatatatatatacatacacacaaatgtatatgtatataaatgtctgttgcatatgctatttatgtatgtatgtgaaaatgtatgtgtgtatgtgtgtgtatacttgttcctcacatttactgagttttgcatatacaagttatcttacacagtccctgaatacaccatttctccataacattctcacacctgcttttgttcattcacccaactttggcacactagtactcaactttggcacactagtactatttcttcttaaagataatcagatacctatagtaggtactaaatatggccttgtttcctacaggagacattagtaatctgttcagaaacacagtagatggtaggattatctggttccaaagtatgtattcttttcacaaaaccataccatgctttaataattctcctttttacccacttcactgtactgaatacatggtaggcacttaataaatacttacatgattagagtggaaatcaaaaaagtctttatgttattgtctaaggtcatagcaaatagaggtggctctaggattagaaccatttctttgtttcctggtccattgctctgctcactctatttttacctagggaaacaatagcaacctcaactctttgtactccagcatgggctctttcagaaactctatgtggggctgggaatatttaggctatttaatgagtgaaactttccatgggtggaatgctggagaagcattttgtggacaagatgaaaaaaaaaaaagatgctattttaaacattgctgaaagagtttgggcaaaatccatctggcagacagactatttcttccatttaaaaactcatcaagcactccaaacgtgtaacctgtaggcaagtttaattaaaacttgagaaatctcaaaataacctgacatttaaatatgttatttccgttctattctcatagtctaacatacatatacagatattctcaggttcaaattaacctccccaatcccatccagccttgcataactacaggattaccctgtgtccatgacaacaggaatgtgaatgaaacagactcatccaatcattgtccttcaaatattaacgtcaatttcatagaaagggaagaaggtagatagaagaaagctgagtagatgaatgagtgaagatatggttgtgacaacagaggacagacagaatgatacgtagatacatagatagatggggtaaaatttatttcccttgtattctctgacaaaggtggagcttgtcttaagagtaccttaggaaaagactaaagttagtggttttccacaaaggaaaaaatttgaaatgtgaaatcattgagaacatatttaaagattccaaatatatactttctgccttagaggaggaattccttttttttttttttttttttttttgagacaaggtctcactctgtcacccagtctggagtgtattggtgtgaccatggctcttgctgcagcctcaacctcccagggtcaagtgatccttctacctcagcctcccaagtagctgggactacaggtgtgtgccacgatgcccagctaacttttgtattttttgtagagatgggattttgccatgttgcccagtctggtctcgaactcctgggctccagcaatctgcctgcctcaacctcccaaagtgctgagattacatgcgtgagtcaccttgccaggtctaagtcaattcttaagtggcctggagagtcctggaccctgtcattaatgctaggtgcaggtaagtggccaagtttgaagccatgagtggccttacaccagtttcctcccacttttttccttccttctctggctttgggcattttatatgattccattttctttttctcccttagcataataattatacttattttttaaagtttaatggttactctaaagttttcaatatgcattttgaactaatctgaacctaccatcatataacactatgccacttcacatgtggtgccttacaacagaatgtttccaattcttccctttcagcccttatgacattgctgtctttcatttcacttatccataggttataattaccaaacacattaccactttattaaacagttgtcttttataacaattaagaatgcgaaaaaattgtcgagcatggtggctcatgcctgtaatcccagcactttgggaggccaaggtgggcagatcacctgaggtcaagagttcgagaccagcctgtccaacatggtgaaacccctctctactaaaaatacaaaaattagccaggcatggtggtggacacctgtaatcccagctacaggaagcagaggttgcagtaagccaagattgtaccattgcactccagcctgggtgacaacagcaaaactctgtctcaaaaaaaaaacaaaaaggaatgacaaaatattttactttcatttatgcctttttaaatgtccttcctttctttgtgtagacctgagtttctgatctatatcattttccttctccctgaagaactctaaatgttttttgcagggcaaggccactggcaattgattccctctgtttttgtttttctgacaatgactttgtttcttctttacttttgaagggtcatttccctaaatatagaattctagttggtagttttttcttgcaacactttaaatactgtactccactgtctttcttgtgtggcttctaatttaaaaatctgctacaactcttatccttgtttctctctatcttaggtacttcccccctctggattctttcaaggttttgtctttggttttctgcagttggaatatgatatgcccagaagttgggggtttttcatttgttttgtttcttttggcatttatcttgcttaatgttctcctatcttcctggatctatggttttgtatctgacattaattttgaaaagttctaggccatttttttttttttttgagatagggtctccctctgttgcccaggctggagtgcagtggtgcaatcttggctcaccgcaacctccaccctctgagctcaagcgattctccctcctcagcctcacaagtagctggtaccacagggcatgccactatgcccggctaaatttttatatttttagtggagatggggtttgaccatgttgcccaggctggtcttgaactctgagctcaagtgatccacccatctcagccttccaaagtgctgggattacatattaatcatagttttaaaatatttcctaataactccaatatctgtgtcatatttcgtctatttctgctgcttatttctttggactgttttttcttcccttttagaattccttataatttttttgttttttgtggttcaaagctaaaaattatgtaacaaataatatggactgaggtaaacaggcctctagtgtgacattttatactaatttggctaggactcgggctgtgtttaacatttggtatagctgttggtgccagaggcttcaaattccttctagttccctgtctttgtctccactgttgactgggcttacagaggcttctcagagagggtttgcatcttgctgctgtttcagctgtaattcgttagtattatataggagacttggtgggggggtaaggtatggagaaggggaaacaatttataattctgtgataaagtttcagttttttgtatttcccaatgctgtgacattcacaggagtttcttagctttccatctcccttagataagacaggaagtcttaaaggggctgcattgggaaaaatgttcttccctcaggtagcacaaagctctggtaaagtatttttctctaaatagtaggcctgcggtatggagaacaaatatgctctgggtatatttcacaatgattaatcttcccctatgcctgccagagccgagaggggatcttccttggctcttcaccctaagaacctgatgaggttcctggtggtaaatcccacaaaagtgtgagtgactttataaccatggcccccaagagtttctcactctcatgctagtccacattcagcctccaacaatttattaaaatgagcatttaagcattcttaccagttatgactccaggggcttctgctgcagtaagcagatatggctgtagttttatggattcacctctctctccagatttgggggcggtagtttgccctgtgacttcagttctctgaaggatctaagaaaagtcgttaatttttcaattgtgcagctttttcttgttgtaaggacaggagtaatgatttccaggctcttaacctgtcagagctaaaaccctatataagttttttaacaattaacagccaactggaatcctcccttttctgcaacaacagaagttgttcatactgtataacataaatcttcaggcacagggcccatgcagcttcttatatctcattgcttccaaaggtcagagtgttttctctgtcttctccacctgtagaaactgcttttgttaatgtgatccttctttctcagtttctaacagattaactccaaggggttcaatctgttgtgttatcctctcaatgcagatcctatggtgtcttttttaaacatttgaaatgtggtttttcttgttctgtttttacaaaccaatccttccttctcagatcaccggtaacgacagactttttattcatttatcttattcctttctgtgtttattcccccactcttttttgcttatttctcaaatgcaaaatgctcttttatatccctccaagacataaagcccacaattccctggcattccaggtggggagatgtatgtgaatgactatattatagagcagcttatgacactgaggaacaagttgattttggagtatagtaggagatgagattggattcacctgaggtgaccagggcatcatgaagtgctggctttcacatttgatgttgagagttgtatcagccagagcccaggtgggaaacagacacactcaagtgaggcaattgagtaaactttaataaagagattactgacagaagtgaggaaaagtctaagagtacccaactgacatggtttggctttgtgtccccacccaaatcttttctcaaattgtaatccccatgttttgagggaaggacctgatgggaggtgactggatcatgagggcagttccccccgccaccccccccgtgctattctcgtgataatgagtgagttcccaggagagctgatggttttaaagtgtggcacttccttgctctctgtctttcctgctgccatataagatgtgccttgcttcccaattgccttccaccatgaccgtatgtttcctgagccctcgccagtgatgcagaattgagttaattaagcatcctttgtttagaaattacccagtctcaggtagtatctttatagcaaggtgaaaatggactactacaccaacaaaaggtggcaatgcatctcaaatttagcaacagcaaaggaactgttactacagtgaggcctgaatgggaaaagaagagggtatgtttaccagaactcatcaagagtgatgggaattgcacttctagaagacatccatgtgtcaggagctgtagattttggtagagaactgcagccactgctaacctaaggcttggcaggaaaataacaggggagataaatgctctgatcccactctcttcctgctttctgatttcctattagtcttttccaatggctgagcccaagtgaagtcagagggcaagcctacagaggtcagcttcctgggaaacaaaggagcatggggagaggtgaaaagtggatctgaaggagcaaatgagggatacccagtccaaaaggattctgcatttctggaatctgggatgaaggatctgacaggatactgacagccacaagtccttgatttgtgggacttagaggtgagagttagagaaaaaatatattgaaaactgagccatttctattcccacatcttgacactctctgcacaatcacctggaccctcacctctagggaatgatttctgaagcagtataaatacttataatagttgctatttttttaaagagatttcagtggaggaaaactgaaactggtggcaaagactcatttttctctcttacagccttctagcagcaggaggaggaaaccgtcgaactgccaatgtggtggcccacgggtttgccaatcttttaactctagacaaaaagaccctccaagaaattctagtgcattatccagattctgaaaggatcctcatgaagaaagccaggtacaacctttaaaacaccattagagatggatggagttggttttactttgtaaactctgagatagggagaaccgtattatgattgtgataaacttgatcacagtgagatatgcttaatgaacaactattaatgtaggtacccattgaaactacacaggttaggataaattgcagtttttttagtagattttgccagaactctcacagagttacctaaaacagcttttctctcttacccacagagtgcttttaaagcagaaggctaagaccgcagaagcaacccctccaagaaaagatcttgccctcctcttcccaccgaaagaagagacacccaaactgtttaaaactctcctaggaggcacaggaaaagcaagtcttgcaagactactcaaattgaagcgagagcaagcagctcaggtaataaggtggagtgaatggacggctgtcatggagaaggccccagactaagtatatacacacaaacgcccactctaattccatttcagacactgggatgatttggactaatctaatactaatacttcctgctttatatatagcacattattatttaaactgctgaattcccacatatcatcacatttaaccctcacaggatgtttatagatggctttaatatgcatgtatttataaacagagtataccctcattattcatagattatttgcagattctatattggtgaatctacttactataatttattagtaacttaaaatcaatactcatggtgcttttgtggtcatttgtggacaacagcacgtgcagggtggcaaaaaatttaagttgcttgatgcatacattttcagctgagtttgaaaaaagaggcactctcctttcttgtttcagctctgatactataaacgaatgacccttggccgggtgcggtggctcacacctgtaatcccagcactttgggagaccaaggcgggcggatcacgagggcaggagatcgagaccattctgactaacacggtgaaaccctgtctctactgaaaacacaaaaaattagccgggcatggtggcacacacctgtagtcccagctacttgggaggctgaggcaagagaattgcttgaatccgggaggcaaaggttgtagtgagccgagatcacaacactgcactccagcctgggcgacagagcaatactctgtctcaaaaaacaaacaaacaaacaaaaacaacaacaaaaaagagtgacacttttagtgccatgctttccacatttttgtgctttttgcatgtgtgtgattttgctgcttaaaatagcccccaagcatagtcctgaaatactgtctagtgctcctaagtgccaaaatgctgtgatgtgccttccagagaaaatatgtgtgttaggtaaacttcattcaggcattacagtgctgtttgcatgagttcaatataatgaatcaataatacctcaaattaatcaattgatcaaattaaatagtgtatctctaaacaaaaacacacatgaaacaaagttatacattgaccaattgacaaaaatattatggcttgaaccataatatctcataggaacctaatgctgtatttcctccaagaacaatggttcagtacttgctaacttgctgtttgtggaaaatttatagaacaaaactacatgaataaaaatcaactgtatatatacagacatacatatggatatataaataaataacccattttatcaacattttcacaaatattcaattactatagatcacaaatgtttaaagcccaaaataactttgtaaatttcatccaagcttttcatgttatagatgaagaaactgaaaaccagatcaagggatttggataagatcataattagttacagagcagaaagctattactcaggtgttcagacttacaggcctacactaagctgcctttcaattcctaaaaatgtaaagaaactcaaatgttattgtttctctctctctctctctttttttttggtttcatatttctttgattctcataattagcctatgagggcagatattgagaaacagacagagcagggattcaggttttctgaacctagtcattatgttatctctaaaactgtagaaatgggtagctgtggacctttcagaaaataagtaaagcacatattataaagtcagtcacatacaaaagatgaaaacttgcattttccttttccacacatacaacactgtggtgaaagttagggatccagtataaaccaaatgcttcatttgcatcagcatagaaataataatttgcataaaaaatgtatgggagtaaagaaatatataagtaaatgtgttaagaatctcaactttatctgtgcacattcatatgtcaggcaagcctttctcaaattgatcccaagcattaccagtaaagagcatagtgtaccttttgctatgaaatttctatagctagtgctaaacacgataggtacaaacatgacaggtcaagcacctgtgggacaaatggaaaagatcatactaggaaagggataagtttctccctgaggttctcccacaagcttaggcaagaggaaaaccctactttttacagtatttttatatagtattggttaatatgtttttattaaaaataaatatttaaaattttatctctacagaataagtaaatatttaaaaagcaaaaacagagtcctgagcactgagtctaataattcagagagtataaggaccaataggaagagaattccttggcagagacaaaaaaatgcaattcagactaacatcatgagtcaaaggcaacaagtccattctctagcacaccagaaacttcatcaaatgatagtcagaagcaaagcagacatgattcctggattcacttaattcagacagtctgtcttggtggtgatcttagccattgcatgctaatcaaaatctaatccaatgtttttaattacgatttcaacaccagttctttgtaattgctccttccagaagaaagaaaattctgaaggaggagaggaagaaggaaaagaaaatgaagataaacaaaaagaaaatgaagataaacaaaaagaaaatgaagataaaggaaaagaaaatgaagataaagataaaggaagagagccagaagagaagccactggacagacctgaatgtacagcaagtcctattgcagtggaggaagaaccccactcagttagaaggacagttttacccagagggacttctcgtcaatcactcattatcagcatggctccttctgctgagggcggagaagaggttcttactattgaagtcaaagaaaaggctaagcaataaatgtttgattatctttagatgtgatatagctagttcccaaagtgattgtacctaggattgtaacttaaattaacgaggggaaacgacatgctgggacccttgagaaacgaaaggcaaatccctagcttagtttctaggacttatctgagagtgtgatttcatgcagtggtaataagaagattattaaaagccatccctattctccgttttcattaactttatgcaattgctatatcttctaattgtatgtagtaagtttccttttcctttggttctttcctgatgatgtctcttccttccagttttattagcttgctcttggctgtgatgtgattcactaaccttttctcttaatttttattgtgtttaatttcttctttggcactctaaagcctggctaattgttctaggtttatgaatttcacctcttacatgtaaagggtataagattttaatgtaataggtcaaaaatcagattattttcattcaaatgaggatgatgagtcactgtaatatcaaaaaatccccagcagctgggactgaagggaagcagagatcatgaagctttctgaatgagaagtctgatttttggaacagtcccctgaagaccaatgttggtcggcagaattagcaaactggcaaaatcacattgcaggaacatattggaaaaattgtaccctttactaaagaaataaacttcaatattttctcttctaaccaacttaaaagacaccaatctacctaactcatctggctcaagggacttggactggaggatacaggctaaagtgacacttatcagaatcttcctcaagcacttgctggaaaagatatcagattggaacttcttgtttaaaattaagctttagtaaaacaaagtgatgaggttaggaaggcagactctacacatgtcagattgacatatccccacaatttccggaacctacatgtatagctgtttacaaaatctccaagttaattaagggcactttaggaagttgtcctcatgaattagctagcattagcataattaccgacgttgcatgctgtgaggaggctacaaaggccaggctggtgtcggaagtaataatacatatagaattccattctaataaatgccattagtgtataacatcaagttctgtgtaatgaggctatttccaagtctccaaagatggtcactgtaacagcactttgctgagagggttttaacaaatcatattagccaaaaagcctacaacatagatgcatttagcaaaccatgtacaaatcaatcactataataaactgcatcatttgatagagtcaccgtttttgcatgtagtgttagagtatcacaaaatataacaagttttactaaaggatggttggttttttcaggatttaagggaatatggacaaattgttaaatagtatttatttgataaatgggagtttgtatgcagaaagagtgaattgcgtataaaaagggtgatttaaaaacccagaaacaaaaggtagaatagggctgaagcatctgataataggaaaagaaaaggacaaaagtcctcaacttgtgagcaatatgctttccctttacaccctgtaatttattcaaatgatattaaaatacaagaccattgcaa

SEQ ID NO: 12 - DNA, 23279 bp, Homo sapiens
  source 1..23279: mol_type = genomic DNA; note = COL6A1_gene
agaaggcagcctcggtctctgggcggcggcggcggcccactctgccctggccgcgctgtgtggtgaccgcaggccccagacatgagggcggcccgtgctctgctgcccctgctgctgcaggcctgctggacagccgcgcaggatgagccggagaccccgagggccgtggccttccagggtgagtggtggcttggggtgcaggctccagaccccccgctctttgctgccggccagggccagatgcgcggggtcccctcccacgcgtggaactgcagactgggggcctggagcccctgaaccccactccccgctcggggcggctgcagcgcccagctctgccccaccgggccttggccggggcccctagaggctcagcattcagcattctcagcggggccggaccgcaggcagctcgggaggggctccctggcgagggggagctggtgcggggctgtctcggcgccccgtgaatccgtttgacccctcacctggcagtgagtccagacgcacggcccccccgacccccgttctagaagaagtcgtgcgctgctggttctgaatccagcgagaaaccttcccgtgaggtctcacttgtccggtcccgtgccggggacgccctgcccttcgggggaggttgtgaaggtttctgactcccctcgaggcacaggagcggtttggggtctctcactccaccccctccccaccgtccccaccgagggacgtcctgctgccttttcccgggagagcctctccgggcccggggctctgtgctgcaggcgctgggctggccgggagggcaggcccagcagagactcggggaatggggcgagagcttgaaggcccctctcctccatcttcggccagactgccccgtggacctgttctttgtgctggacacctctgagagcgtggccctgaggctgaagccctacggggccctcgtggacaaagtcaagtccttcaccaagcgcttcatcgacaacctgagggacaggtaggagggacgccccgtgaccttcctcctgtgcttctgggcctcttggagggaggggtgggggcccaggggaacacgggtgcgacggcctcaacctcctaaggttgggcgagcgttgccctgaccggggcccctcccggcgccctccagagtgaggccggggccctttccggcgccctccagagtgagctggtctgagcctctcccagcgccttccagagtgagctggtttgagaccctgctcgcgggggtggcacctgttcagcagggccgaggtgacagtgaggctgagatgtagggaagagaggctcccgcaggctgaccgagagggctcagcgcactggcccagacacgcagtcctgcctggtgcgcgggagcccctcactaaccacctggaccctggtttgttccgtgggcagtgagagcctctacctgggtcctggatcccacgttctgaaggtccccgactcgggagccaggaggggtgtcgctctgcagccccagggcccccaggcttggttctgggcttgggacacggcaccctctgctccacgttcctccatctgtgcgtgtggctgaggacagaccggggggagaggggagtcggtcctgtgggtgcacagggccgctgaggggggggcatgtagaacggggctcccccactgagacgggtcctggcagtggggacacagcttagccggcgtaggaacccccgtcctccttgaccctgctgactggccgctgggccggagcctcccgccaccagaaggggcacagtcagaggctgccggtaacagcagggtggaccttccagcccacaccgtgcccagcaggagccattggtaccaggaaccctgagcttagtggacatggccaggcccgtgcggcagtgtttgggggggggtctggctgtggatggcaccggggaggggcggccgcgtggcccagcgtcccccgagtcgcccttgttgcctttactcagtctccccatgactcagtttcccacctgtgaaatggggcggagtcatccccatgtcgctgccactggattcctgcaggcgccgtggtcactctgctgaatggatgggagggtgggtggggcagaggtgggcccaccccaggctggggcagagcagacccctgagagcctcaggctcaggtgctcagagggcagcgagggggctgctcagatccccggggtgcctccttcccccactgtcatgctgccccactgcaggcccaaggaccccaccccagcagggccacacactcagggctcctggtctgagggcctgagggatcggggcgcaggtcgcttgctggccacacccgcctgcacagccttccaggagggccggcctcagggccacagggcaagtccagctgtgtgtcagccacggccagggtggggcagcctgtccatctgggtgacgtcgcgccctgggacgggtagcgatggcgccaggggccgcccgcctcacgcccgccgtgcctgttcctggcaggtactaccgctgtgaccgaaacctggtgtggaacgcaggcgcgctgcactacagtgacgaggtggagatcatccaaggcctcacgcgcatgcctggcggccgcgacgcactcaaaagcagcgtggacgcggtcaagtactttgggaagggcacctacaccgactgcgctatcaagaaggggctggagcagctcctcgtggggtgagtggcccccagcctcctgcccacgccagttctcacgcgtggtacccagcctgggctggggttggcctggggtccctgtgcggcttcagctgcagcctccctgttctcttggaggctgcacggcctccctgacccactttgtgggcaggaaagagacggagacagacagagacagagagaaacagaaacagggagaaacagacacagagagagacagagacagagagagatagagacagagacagagagagacagagacaaagagtgacagagggaccaagacaggcagacagagacaaacagagacagagacagagacacagagagagacacagagagacagagacgggaacagagacaggcagacagagacagagagagacagagacagaaacagagacagagggacagagacaggcagagagagacagagagacagagacagagacagacaaacagagacagagagacagaaacagggacagagacagaaagagagagagacagagggaaacagagagagacagagacagatagaaaaagacagaggcagagagaagcagagacagagaaacaaagacagtcagagacagacagagacagagacagaaacagagacagagagacagagacagaggggcagagacaggcagacagagagacagagacagagacagcgaaacagagacagaaacatacagagacagagagacagagagaagcagagacagacagaggcagagagacagagagaagcagagacagggacagagacagagacagaaatagagagatagagacagagggacagagacagagagatagagacagagagggagacagagagatagaagcagagagagagagacaaagacagaggcagagagacagagagagaagcacagacagagacagacagagagacagggacagacagagacagagagaccggaaacagaggcagagagactgagagactgagagagacggggtggttttccccacagcatcaacaccaagcagggctaggatcactgaaacagactcatcagacccgaagcatgcgctttctcggggtttttctggactgaggggtttcctctcatcccagtgtccagctgtggggacgcaggggccgcaagccccggagtgtccagaggggaacgtggcctccccacacccagcccttcacgaggcctcaggatcccagtgggggtacccgaggctgccctgtccagccaggcggtgcggggggtttggggagagcctctccccgaggtcggtctcagagggccacatggccggtgtgggccggacattccctttccaatggttgtgcccacttccctccagagttggtgccaagctgggacctgggggacttggagtctcaggaagtcgtccgctgtctgcagggggtgcatgggggatgtggccacacacgtcagagtgcggccccctgtggaagccacagacagacacgactcccctaaatgagctcgcccttctggccgagatgctcagcgtccccagcaggctgcccgactgccctgcgatactgccctccttcctgctgctcccactttccctttcggggggttggatttggggcattcagggatcgccctgttgtttgctcatcacacccatttcctgcaagagccacggtgaccgagcagccttgagttgaggcagcttgtgggtagacgcggcgggcatctcggaggggcacgctccctgccaccctcagcctccactcactggtcaggggctttgcgccccagggcaccccaggaaccgagcctcctttggggtcatgggtgcctctcctgggagggcgtggattttccaaagcagtttagagaaatgagacccacaggcgttatttcccatggtgaggttcttttcagtaacccccaccgtatagccaggatcagcaaagagaggcggctcctcccggtgagacagggaccagcacctcccggacaggcttgggtctccctccagttcccccacctagtctcgaggtctcacgctgccctctcctgtccaggggctcccacctgaaggagaataagtacctgattgtggtgaccgacgggcaccccctggagggctacaaggaaccctgtggggggctggaggatgctgtgaacgaggccaagcacctgggcgtcaaagtcttctcggtggccatcacacccgaccacctggtaggcaccggccccccccggcagatgcccccaaccacagggagtggcggctgcaaggcccccggcagctgggaccgtcttttggtcctcgggagggtgtgggttctccagccggccacccttgcccctgagaggccagcccctcctgctgaggagcctggagcgccccagcccagcctcccctctggccctgtgggaagcggccccggccgtcaggggtcccagccctgctcagcccaccctgaacactgcccccaggagccgcgtctgagcatcatcgccacggaccacacgtaccggcgcaacttcacggcggctgactggggccagagccgcgacgcagaggaggccatcagccagaccatcgacaccatcgtggacatgatcgtgaggcccctgcccaggagacggggaggcccgcggcggccgcaggtggaaagtaattctgcgtttccatttctctttccagaaaaataacgtggagcaagtggtaagagccctccccaccacccccagccgtgagtctgcacacgtccacccacacgtccacctgtgtgttcaggacgcatgtccctatgcatatccgcccatgtgcccgggacacatgtcccctgcgtgtctgcccgtgtgcccgggatgtgtgtccccctgcgtgtccacctgtgtgtctgcccatgtgcctgggacatgtgtccgcctgtgcgtccatccgtgtgtccgtctgcccatgtgcctgggtcgcatgtcaccctgtgtcccagccgtatgtccgtggctttcccactgactcgtctccatgctttccccccacagtgctgctccttcgaatgccaggtgagtgtgccccccgacccctgaccccgcgccctgcaccctgggaacctgagtctggggtcctggctgaccgtcccctctgccttgcagcctgcaagaggacctccggggctccggggcgaccccggctttgaggtgagtggtgactcctgctcctcccatgtgttgtggggcctgggagtgggggtggcaggaccaaagcctcctgggcacccaagtccaccatgaggatccagaggggacggcgggggtccagatggaggggacggcgggggtccagatggaggggacggcgggagtccagatggaggggatggcggggtccagatggaggggacggcggggtccagatggaggggacggcggggtccagatggaggggatggcggggtccagatggaggggacggcggggtccagatggaggggacggcggggtccagatggaggggacgtcggggctccagatggaggggacggcgggagtccagatggaggggacggcggggtccagatggaggggacggcggggtccagatggaggggacggcggggtccagatggaggggacgtcggggctccagatggaggggacggcgggagtccagatggaggggacggcgtggtccagatggaggggacggcggggtccagatggaggggacgtcggggctccagatggaggggacggcgggggtccagatggaggggacggcggggtccagatggaggggacggcggggtccagatggaggggacggcggggtccagatggaggggacggcggggtccagatggaggggacggcggggtccagatggaggggacggcgggagtccagatggaggggacggcgtggtccagatggaggggacggcggggtccagatggaggggacgtcggggctccagatggaggggacggcggggtccagatggaggggatgtcggggtccagatggaagggacggcggggtccagcaggcaggctccggccgtgcagggtgtggactgtcccgggggcgctgggggcttctgagggtgtctctgtccgccctgccctcagccgcactctgttcagaaggacctttctggaggtaggagggtgagaatgtgggtcccctgcttctgtgtggctcacataggatgaccttaaacgttagaattagctgctgataattaaaacttgccatgaggctgctcatggacctcagatttctggcttctcctaaaaaccatcaaacccagcagctgtgggcccgagtcccatggccatttcctgggggtcgagctgtgaccctggggggcttctgtgctgcacgtccctcccacctgtgcctgggggtcagcaaagccgagcagacaggaacgaaggcagggagtggggggagctggcgtgcgggttggagctcccagacccaggctgaccagatgtgatggggaaggtgctttaaagcccttgatccctgaaggctggatgaagcgtctttttaaaaacctgtttcgtgagccagctttttagaaagaaacggggctgccccaaccttgacctgttttgtgttccagggagaacgaggcaagccggggctcccaggagagaagggagaagccggagatcctgtgagtgcctgactgtggggtgggggccctaagaagctggaggcggggaacgactaggcctcggaaacttccggaagagtggctgggttctgagtgccaaagtcacactgcctgttccttgtgggtgggagcagacctggaggggccacagcccagccatccttccacacagccccccaggcagcccgtaagcccccctgccagggaggggctgggtggggaggtggcccagggtgctcaggccggcaccgtccggggcccctgccgtggctccttggcccaaatcctatccatagacttccctcccccagctccaccttggagggcctcggcaccatgggccccgtgcagcagggcccctctctcggcctgaccaggcctgggctggagggaggggtgtggggctgggtgggactggcccctgcccctgctcctccgggggtgtctcaccatctcctcctgtgttccagggaagacccggggacctcggacctgttgggtaccagggaatgaaggtacgtgccccccctttcctggcccgagcccggtggtgccctcagccttgcacagcactaacaagccttcctcttcctcttcttccgctgggtgtgtagggagaaaaagggagccgtggggagaaggtgagtgaggctcgacctcggagctggtctctccaggcgcagatgtgccatcctggacgagggtgtccccggggatgaggacagtgtccctgacaggagaccacgtgtcctgcagacccgctccaccgcccctcgccgtcccctccatctggaaggacaaggacagccacccaggcacccagcaaaggcgcctgtgtcactttcaccccaccccagagcaggggtcccccgggcggttaccctctgcggagccgggggtcccccgggcggttaccctctgcggagccgggggtcccccgggcggttaccctctgcagagcggcccctccccatcactgtcagtccccatgattctcagcagtgatgttgtcccctcgggttgggggcacccaagcccctgcctcgcgtgggcctaagccaggcttgccctgccctccccaccccaaataccccctcacacccgcttcctgtctccgcagggctccaggggacccaagggctacaaggtgagcgtgggctgctgggaggggggagttctgcccccacggcagcatgtctgacctgcatctgactcctgccttcgttttcccgcctcacagggagagaagggcaagcgtggcatcgacggggtggacggcgtgaaggtgactggggggagataggatggacggggagggacgaggaggaatggggcgagatggggagggacggagtggacggcgtgaaggtgacccggggagggatggggtggacagtgtgaaggtgaccaggggaaggacggggagggacggggagggatggggtgaggtgatcccggcaggagggacagggaggagtggggtggacggtgtgaaggtgaccccaggggggtgtctgctaggcagggctttccagggagggtgtggagggcatggagggcaccaagtctgacagttgattggcctcagtttacccacttggccgtcagattttctagttttcttcctctttccagggggagatggggtacccaggcctgccaggctgcaagggctcgcccgggtttgacgtaagtcacttcctctcactgatactttaaaactagcgctgtcagcagcacctcgtgtggaccgttttgacttctgtctgggcggtctggggctgctgccagaggccgcggtggcctctgccggtggtgtcatgctgccctcttttctccagggcattcaaggaccccctggccccaagggagaccccggtgcctttggactgaaaggagaaaaggtgagtgacttgcggcccctggaggaccagggccttcacggttggccaagcgctgaattggaaacctctcctggaagcaagtcctggtccgagcatgtcggccacccgtgcggcctcagaggggaggagctggtggaggctggaggcaggcagaggagcagcggggacagtgcccaccgtggggacagtggccgtggcgctcccgcccagagccttccctgcagcccgagggccttcaggcctccgccattctgtcccccgcacctgccgctcgctcggcacagatgggaccccaccgcgtcactcctagcctgcgagccgcagcccagaatggctctcagaactgagaatgggctgggtggcactgagggtggcgagtgggcgggagggtggtgagcgggggcgggaggagggtggtgagcgggtgggagggcgagtgggcagcgggagggcgggagcacgaggcgggagaaggagctttttcgtctgacagctgagtctgccgttgctggtgttttctctggagtttctttgttgaagctgaagtgttggggaagacaaaggcgaatgctgaccccaccccaaacattcccagacgagctcctagaacccagcagacggtttccaaatctcatcttcaagttcccagattaccctccaggccctagatttgagtttgccaatttgccagcctggcaaagctgtgccttctctaatgggaaccaaatcctgccccttagacaagatggcccttggctgggcctcacagggaacaaggttggagcattccaggaggtctttgtgcagggttgtggatggctgagggtgctggggggtctgggctcagacagtgttggtcagagggagtggcctgaagtatgggtgagaggccctggatgtggcctctgatggctgcacccctggtgcacacccctgccagcgtgtgtgactcccccggtcttccccagggcgagcctggagctgacggggaggcggggagaccagggagctcgggaccatctggagacgaggtgaggagcttcacagcccccacacatgccaggtatgggcccagggagggtcaaggagatggagcgaccattcaacccttgttccccacagggccagccgggagagcctgggccccccggagagaaaggagaggcgggcgacgaggtgagtgagggctcctgacaccttcctggggaagtgcatggcctcagcttctgatcctctttgctcggggtctactccacgtccctgagaccaaatgcagtgtgtccaccagactaacgccggcgtctgtttctcttcatcccaggggaacccaggacctgacggtgcccccggggagcgggtgagtggggcaggggcagcctgcgctgttggcctcaccatgtagctgtggacgtggcctctgcggcccagtctggccctcccagcactgagagccatggcctcctgcccaagacaaatgggtttcttcacccacacgtccaggatgcctcttcccacagtctcagagcgggtgggacctggggaaccaggagattccggcctctgcaaccgtggggcatgcggtggaggggtggcccctcccaggggtcctgctgggggagtcagtccaggccaggcctcaagccccaccccagctgggtgtgagttccagcagctgaggcttctcccctccatgtctctccactcagggtggccctggagagagaggaccacgggggaccccaggcacgcggggaccaagaggagaccctgtgagtcacagttcctggagctgggaaccaccccaggaaggggcaggcggaggctggggctgggtcaggcctccagagccacaggacacatcatgaagcccctgtggcccctcaacgtggccagcccatccccacgccgtcagggagggcagcccctgaagccggcgcccagccatgtgcctgatgctgggacctgtttcatgtgaaggcgttgcccgtggacccggtgcccactttcccaccaggcggcttccacgtttctgcatccgagcttgggttcttctttggaataattttccttagttaaaattcccagcgtgaggaagttgggtcagtaccccagacgggaagctaggcctgcagggcgcctgcctgggaaggcttgacatggaaaactcaccccagagccgagatgccggcggcctcagaggccaccccccaccttcagctccgtggaccgtgggcctcgctaggccaccccacagcccagcctcagggtgcagaagcacagggcccttctctgtccctgtgacttgctgggaaatctgtgctggatgtggggcggggcagctggcagactccgggcgtctcagtcccatccggctcagggagagccagggcctggcgggcagagtgaaggggagagaatgccctagtgtgcccagccgagctgccaggcctcagaggcagcgcccccgggtgcccccttgtccgagaatcaagacatgcgactgtcgtgtgctgtgacagacaggcggggctccagcagggccagagagctgagccggggccagagtcgccgccaccgagggatttggctccccagtggggggtgggggatttctgacctcctccctgggagctccccagaagcgcacagcccccgtggaggggtcggggggacgtcaaagcagggatcgtgtgacttagtgactcagactgccttctaggcccactcctctgagatcaggatatgagactgacagccaggcagagcccagaggaagggccagccacgcagctccagcttcccggcgggccacaagtccatggctacaaacacttgccgggtccacggagcttgctggagaagcagggatgcacgcagggacgcctctggggccccaggaggagctgccggcctcctgaatgaagatagccatagccagccacgccgatggccacgcacgtgggccgaggaaacgcttggcgaggccaggaaggggctgtgcggggagggaaggccggaacagcccagtgaccacctggacagcatgctgtggctcccagcgtgcccgggcagccatcctccccaaggatggcccagctccacactcacggctcgtttctcttcagggtgaagctggcccgcagggtgatcagggaagagaaggccccgttggtgtccctggagacccggtaggaagcgctgtggggttggggggcgttggccaatttgggttttgggggtagaagtgctccagcagctcacgcactgggggtctgttcatttccgtttgagggcctctgtgtttccgtagatctcgggggtgtccctgcgtgggagccggctgcagggggtgaggcgcggcctgggccgggctggtgtggattgttgagagcaggcccagcgcccgggggcctgacgctgagacgctcagcccaggtggagaagcgctgtctgggggcccatccggggcaagggtgcctcacagtgaggaagaggtgttggagcccctgggagacactgggagcttggtcagcatctgtttttctgggtcaggagccaggcatgactgtggctggaggtcaactggggagtgtgaggctatggaggtttccagaatcccagggtgtcaggatgaaaatgcactttcatctcattctaaattcccttctccgagcctctggaatcgctgtgcacgccgcacggctttctgtctcttcccccattctgatgactgccatgatggtggctccagtgtggtgttgcccgcaggctgggctgggccgttgcatcctcccggagctcacctgccccacggggacaggaaggcctccacacggtcacgcccggagacagcaagtctgtgctcccgagcttgtctgcttctgtggacaaatcgaccttacggctccatgtgcgcagctgcccacacaccgagcacaaggccagaccctgggcacggcagctgtctcagacgtccagcaagatggggcctcagacccagggagatgggagaggccgtcccagtgcaagtcacatttgtatttctgtgcacgaggtgaaatcgtgcttttgtggtgccaacgggtgttacacagctgttaaaaatacctgtgtcatagatgaggaccagggcagggcttggcaggcggggtctgggccgttcgtccacctggtcctgcgtgccgctcacggcaggggcagaaagggctcccgacaccttcctggggaagtgcacggcctcagtctctgatcctctttgctctttgagctcccggggctccagccctgaggatgatctgacctcccatgtggtcacccaggacagggccaggtgcagggcacagtgcgtggaagaggccatgcagccagtggcagattgtggggaggggacggcccagggccacgttccaggcttgggaggctgctccagaccttggtagctgaaagtctcagtgggaatgagcgttcagaggccaggacttgctcggagaattctaaccacaccctgcctgttttatatgttcagttttcaaagtaatcaatagccactataagaaaaaaacaaagccactttcaaagggttgtggtaagaggcagtcctgtgagcaggccggctgcagggcctccagggctgtggggcaggctgcacaggggctggtgggtcccatgcctgggggtctgggaatagtctctaggctgctgtcctggaggaggtttcccccaacgcctgagaccagggcaccatgtgacccatgactcacagttgcctggctgaggcaggcacttgttcacctggagcctccctggggcctttcggggcccgggggtgtggataggtggctttggagccacatttgtccatcgggacgttgggctcccagctggccttccgggctttccctgctcccagaacctccctgctcagcccttgccagccttacccctcccctccaccctgcccagcatggggctctccctgtgtggatgccagaagcagttgggccctcagggctggtcccaggaggtgcccccagtgaggtgctctgcagaaactgcccagtctggcctcctgctgtctgtggcacagtctgactgtgtgtggtgaggtccaggccttctgcctcccacttacctggcccagggcacagagacctcctttccatccttcctcctggcccccttttcgtgttcccaaggcaggatctcagggtaccagactaacccctgttgaaccccaagtttggtgagcttctggacctccttgaggcccgtgtgcaaagtccccagtcaagtgtgcagtcctgactgctggggcgttgaccacgaagggtgcaggagcttcacagccaggcctgggtgcttgcacagtcggggtagagagagcaatacactagatgcctcctgtctgcctggtggaggccacggggtcaggatggtgaatgggccaagtctggtagtggggaagttgtaaacatttgaaccaccggacaggcctcatcgggaagcatcagcctaaccacaggccagggacaggcgtctgagcaggcacaggccagggacaggcgtccgaccaggctcatggctggggccaggtgggccaggtgggccaggtgggccgggcgatgtgtacacggctcccttcttggctcagctgggcgcgctgggaagtgcttggggtgcctgggctagactccgaagggcagggactcgccgctggagttgtccacggagcaggccctcaaaggtgggagctggggccagctctggaaatagacccccacagggtcctcatgagatgtgggggacccaaggaagtccagcaggcagcctcaggtgcaggtgggggcagggtggtgtccaggctcagcccacagagggtcctgcggttgggggtgggctaaggggaccaggccaggcccaaaggggaccatgagggagggcagtctggggccactctgataggagaaggggcaggtggtctgcggcctggggacctgtagcctcacccctccgtggggacctgaggcaccagccgggcactcaccgaagtcatctgggacaggcttcacccttccgtgggggcctgaggcaccagccgggcgcccaccaaagtcatctgggagaggcttcacccctccgtgggggcctgaggcaccagctgggcgcccaccgaagggcttcaacacttgtgcccaggcccttcgtgcaggcccttcgtcagacccaagagtgggcctggctctccccctgcactgatgggactggggccagagcctgggggccctgatgcctcttggtctgagaccctcagcttagggtcagggagggctcaggctgggtgaggcctgtggtccaacgtgccatatccatctctctacagggcgaggctggccctatcggacctaaaggctaccgaggcgatgagggtcccccagggtccgaggtgagtcccactccccacccacacccgcccacccaggggggcctgaggatccagaacccactgtctgcccagtgctggccccgtgccctctgaggactctatggccctgggtgtcctggctcccgatgggacctctcccggccccaggagggccctgcttccctccaaggtcaccatgctaagcctgctcccctcacgcctcctcttcctcctcagggtgccagaggagccccaggacctgccggaccccctggagacccggggctgatgggtgaaagggtgagtgtccaacagctcgggccctagggcggaggcctggccgccagaggccctgggaagccccagccccgcactgtggagctgcctggggtccctgaccgggccgggagtgcccgcagcatcactggctcctggccacagtcggcacctgagccagaggccgcctcggcagggcccctcctgccccgagatccgggtcccagggtccacggggaccagcagggtggccccaggggagggagccggcttctgggctgacggaggggccctgcgggtgaggtgctcccgggcctgtgccagccagtgggtatcccaggccaggccgattcgcacggtgacggctactctgctcccccagggagaagacggccccgctggaaatggcaccgagggcttccccggcttccccgtaagtgtccggaggctgagcccacaggaacatgcccaagctgcctgcggcgccctctttagtggactgggcactcttgggtgggcgggctggccccaggaccgccggctggcccaggaattccatggccgggattctgtcagctcaggcccttccgctgtgcgcccctcacagcctcccctctcaaatcagaacccggtatcactgccctgcttttccatgacaggggtatccgggcaacaggggcgctcccgggataaacgtgagtacgccccctcctccatctggctgtgggcacacaaacattcacagtcacagggacacgcacgtgtgaacacacatgtgcacacaggctcccgagcaaacacacggggtacacaggcacccacggctgccccactgtctgtggccacagccccagttggcatcggctcctgcaggccctgcgaggctcccactgtggtgtggcctgtgggtctcctcacggccctgactgcccggtgaccgatctcccctcggtgcgcagggcaggcccagccccagaggccgccccacggctctctaggccactccgggacccagtttctccagcccaggaaatgtgtgtggtgggggaagggaagagaagagtgcctctcttatctttatttttttccttttaaaatttccacttcctaaaaacaaaataaaacccttgttaaccaagtgctctcccgtcactgcagggcacgaagggctaccccggcctcaagggggacgagggagaagccggggaccccggagacgatgtaagtgtggatgggaggcagggccagccccaagtccacctgagccagagggctgggcccttgaagggcagtggaccaggacccgcttggggaggcctcatgggccccggctgctggatgctctgtggacggggccagcgcgcagatgcccgggtggtgcacggtctgttgacacaacgctgttcccttctagaacaacgacattgcaccccgaggagtcaaaggagcaaaggggtaccggggtcccgagggcccccaggtgggtggatgtggctgggtgaggccacggtgggctgtgcctgggacgccggatgctggggctggggaatgctggaagaggctgggagagtgggaggcggcgggagggaattttggggagcacgtcatctgggaggccctgggggtgggaggtgccggtcaccagggccaggtggtggccagggcagcagagccgagcccagggacacagcgggtcctcagggtggggcccacctgggatggccgcctggaccaccagtgtgcgaagccccagctgccctcacagcaccgtcactggaggacgaggggctgggtagggagggaccgggcaggggtgggcttgatgaggggcagggccctgggggtgggggctgtctcagctcaggaagcacagtgggctcctcaccctcagagctcctctactccgtttctcggacagggacccccaggacaccaaggaccgcctgggccggacgtaagtggggctctgtgaacattgctgggggcgaccactgtagcttccatcccttggggtgtgggtcctgtccatgggtgctcctgtagacgctgctcacgggggggtgggttgtggacaaagagctggtgccaggccctagggacccgtgacggccatgggaggacccgtgaggatcatagggggatgtgtgaggaccatagaggggacatgtgaggatcatgggggacatgtgaggatcatgggggggacgtgtgaggatcatgggaggacgtgaggatcatggagggggacatgtgaggatcatgggggacccgtgaggatcatgggggacccgtgtgaggatcatggggggggacgtgtgaggatcatggggggacctgtacccatgaggaccatgaggggacccgtgacggccacggggagacccatgactgcgctgtttctatgaccacgtcaggggtccagcccagtagcaggggtgtagtgggcagagccgggcacacctgcaaagaacctcctgcccaaaccccgccctgtgggggccccagggagggtgacctggagatccagcagcccacagtccccgctgggaggggctgtctatggccccagtaccctcgtctctccctccccaggaatgcgagattttggacatcatcatgaaaatgtgctgtgagtatctctgagaagccgtcctcgttagggagagcagggccgccagcctggcctgttccactcctagaagggtgtctccactgttgggggcctgggtctctgggtacatccttgaggaggctcctcagccagcccctaccggcctccaaagccctcccaggcccccgggtccccgcacaggctgagagtccccggtgcggtgcagagctgccacgtggggagggcggccggggaggcggggaggcggggcaggaggccggggaaggggggaggccggggaaggagggcggccggggaggcggggaggctgccccaagagtaaaagcctttctgacgtgcgcaggacgcggccctgactggtctaactgactctttctcttctcctcagcttgctgtggtgagacccaggctctagctcctgagagaatggatcccgggggtcggggagcgaggcctgggtcccacacatgtcacaggacagcacatggcactctggtccccgcccgcagctccctgcacctgcccgccccctctggggcctgctccaagccagcagggttcccgggtgttgggctgggccccgccctctttcacccataactgaaataaccaggagcaggcttgggggggtccctgctccatcattctggcccacaggccccaccctagcctggctgagcaacgccagccctgaccagccgccggacagagcagcctttacggggccatgggagggggtgggcttttctggggctgagacggggggaccccaacgtgtcaggtgaggatgtggcagccaaggaggggccagggcggtggaggggaggggccagggcactggaggggaggggcgtgctctgctgacaccgcccccgcctgcagaatgcaagtgcggccccatcgacctcctgttcgtgctggacagctcagagagcattggcctgcagaacttcgagattgccaaggacttcgtcgtcaaggtcatcgaccggctgagccgggacgagctggtcaaggtgaggcctcgccccgcccggctttctcaagcccaggtgcaccccgaccctgccggccgcccctgcccgcgccagacctcagcctcccgaggccaccgctgcatccctgtgacttccctactcatgacaaggatgccaggcacgcgccagcccgtccaggcctccagctccacctggcgaggctggcccattgtacacaggcgccccagatgagggagggtctccccctctccttgaagggcggtagtctggggtcctgagtgctgggtgtgggcttgtccctcgtggacagaacccaggagggcttcatccaccaaggaagattgctttgcagggtacccaggtcccgggggctgtgccaccctctgggcacccggagccaatcgcagggtacccaggtcccgggggctgtgccaccctctgtgcacccagagccaatcgcaggggacccaggtcctgaggtcctgggggccatgccaccctctgggcacccgcagccaatagagtcacccttgggaagcttatgcggacctggggcagcactcgcgtcctgaccccggtgccggtcccacagttcgagccagggcagtcgtacgcgggtgtggtgcagtacagccacagccagatgcaggagcacgtgagcctgcgcagccccagcatccggaacgtgcaggagctcaaggagtgagtgccccacgcggccaggaccctcccacccctcgccccgaccgctgttcccacggcaggtcggccctgacccctgatcccaggtgggctcggccccgcggcaggcctggccccaaccggcccttcctgccctttgctatgcagagccatcaagagcctgcagtggatggcgggcggcaccttcacgggggaggccctgcagtacacgcgggaccagctgctgccgcccagcccgaacaaccgcatcgccctggtcatcactgacgggcgctcagacactcagagggacaccacaccgctcaacgtgctctgcagccccggcatccaggtggggtggccacccccaggctgcacctgccccgcctagggcgccccgccagccagggtggccttgtccccagaaagacgagggcagagcaggctgcgccacaccgatactgtctgtccccacaggtggtctccgtgggcatcaaagacgtgtttgacttcatcccaggctcagaccagctcaatgtcatttcttgccaaggcctggcaccatcccagggccggcccggcctctcgctggtcaaggagaactatgcagagctgctggaggatgccttcctgaagaatgtcaccgcccagatctgcataggtgcgcatggggccacccgggcagtcccagatctgcgtaggtgcgcgcggggccgcccgggcagtcccagatctgcgtaggtgcacgcggggccgcccgggcagtcccagatctgcgtaggtgcacgcggggccgcccagggccgtcccagatctgtgtaggtgcgcgcaggcgcccagggctgtcccagaggcctcctcccagctcactgttacctccaggggcacggccaccctgtaggtgcgcacggggccgcctggggctgtcccacaggcatcctcctcccggctcgctgtgacttccgggggcacggccacccctgtgctcggccgggaggtcctgtgacatctccttgcggggttataggtggagcagtgggctcacactgcacggcttttctcttttacagacaagaagtgtccagattacacctgccccagtgagtacctcggcggccgggacacgtggggaggagggcaccgtggttggggcgagggctctgagaggacggggctctgggaggagggcctggcggtcacgagagtaggtgcatggctcactccggtggctgagcaccaccgtgccgtgccctctctggggagcttagacgctctctggccggcccactgcggctgcatcaccagggcctcatgctaacggctgcccaccccgccccgcagtcacgttctcctccccggctgacatcaccatcctgctggacggctccgccagcgtgggcagccacaactttgacaccaccaagcgcttcgccaagcgcctggccgagcgcttcctcacagcgggcaggacggaccccgcccacgacgtgcgggtggcggtggtgcagtacagcggcacgggccagcagcgcccagagcgggcgtcgctgcagttcctgcagaactacacggccctggccagtgccgtcgatgccatggactttatcaacgacgccaccgacgtcaacgatgccctgggctatgtgacccgcttctaccgcgaggcctcgtccggcgctgccaagaagaggctgctgctcttctcagatggcaactcgcagggcgccacgcccgctgccatcgagaaggccgtgcaggaagcccagcgggcaggcatcgagatcttcgtggtggtcgtgggccgccaggtgaatgagccccacatccgcgtcctggtcaccggcaagacggccgagtacgacgtggcctacggcgagagccacctgttccgtgtccccagctaccaggccctgctccgcggtgtcttccaccagacagtctccaggaaggtggcgctgggctagcccaccctgcacgccggcaccaaaccctgtcctcccacccctccccactcatcactaaacagagtaaaatgtgatgcgaattttcccgaccaacctgattcgctagattttttttaaggaaaagcttggaaagccaggacacaacgctgctgcctgctttgtgcagggtcctccggggctcagccctgagttggcatcacctgcgcagggccctctggggctcagccctgagctagtgtcacctgcacagggccctctgaggctcagccctgagctggcgtcacctgtgcagggccctctggggctcagccctgagctggcctcacctgggttccccaccccgggctctcctgccctgccctcctgcccgccctccctcctgcctgcgcagctccttccctaggcacctctgtgctgcatcccaccagcctgagcaagacgccctctcggggcctgtgccgcactagcctccctctcctctgtccccatagctggtttttcccaccaatcctcacctaacagttactttacaattaaactcaaagcaagctcttctcctcagcttggggcagccattggcctctgtctcgttttgggaaaccaaggtcaggaggccgttgcagacataaatctcggcgactcggccccgtctcctgagggtcctgctggtgaccggcctggaccttggccctacagccctggaggccgctgctgaccagcactgaccccgacctcagagagtactcgcaggggcgctggctgcactcaagaccctcgagattaacggtgctaaccccgtctgctcctccctcccgcagagactggggcctggactggacatgagagccccttggtgccacagagggctgtgtcttactagaaacaacgcaaacctctccttcctcagaatagtgatgtgttcgacgttttatcaaaggccccctttctatgttcatgttagttttgctccttctgtgtttttttctgaaccatatccatgttgctgacttttccaaataaaggttttcactcctc

SEQ ID NO: 13 - DNA, 233203 bp, Homo sapiens
  source 1..233203: mol_type = genomic DNA; note = DYSF_gene
gtccaagagcgagatctgggctacgccgggcgcccggagccctagtccagcccccggccatcgcggccgccgcccagccaggtgcaaaatgccgtgtcattgggagactccgcagccggagcattagattacagctcgacggagctcgggaagggcggcgggggtggaagatgagcagaagcccctgttctcggaacgccggctgacaagcggggtgagcgcagccggggcggggacccagcctagcccactggagcagccgggggtggcccgttcccctttaagagcaactgctctaagccaggagccagagattcgagccggcctcgcccagccagccctctccagcgaggggacccacaagcggcgcctcggccctcccgacctttccgagccctctttgcgccctgggcgcacggggccctacacgcgccaagcatgctgagggtcttcatcctctatgccgagaacgtccacacacccgacaccgacatcagcgatgcctactgctccgcggtgtttgcaggtaggaggggccgaccaccctcgcccggggtcggggtggggtagaggaggggacgccgcggctctcaaccctggagagcacctagagctgagagacaggagactttctggccccgccagactgacgttgagtgttgcaacgacacaggtctgcagagggcgactcagagggaaactgaggctggaaggagagaggtgtctgaatggcgcttctcctggaagcttcagcccaggttggtactgaggtaggccaggaaggtgggaccagcatctctcctctcaccttttcgggatctctgaaaagaggtctttctgcgttgccggcggcgaagcgctgtactgcagggctctcctccttctcccctgaaggtctggtcccaggcctatttataacccagctctcttcccgccccgatctgcgcctggctgctttcctggccctttgctctctctcagaggctggcctggcaggctggcagccactggaggcgaaggcaccctacccttgctttgcgcacaggatgggggaaatttagcagctgggcacagctgtcacagcaccaacctttacagactttctctgcccccaacccctgcccccaacggaccagtgggtggagggagcgggggtcgtatctgctttctatcatcagagtgaggcctccttgagcagggaagccactcccttatcagattgggacctcctataggagggccttcatagagttatgacttgacttttcctccaggagctgagggctgggccctggctgctctccaggaacccttcaggaccaagccagagctaggatctacacagctgggtctttgggcttggaaccatactgggggagaagaactagggggaaagagtgtgaacctcccacccagcctgtgggttttcctctcagcctccactacctgccactccccttctccccagagatctgacttctaactacatcccagacttccagaaatcatagcattagttggtttctggccattcagcacagtttcacaagctcctggatacacctgttcacagacaccatctgcacatatgatcccaggcacatgcacaccctggagcgtgtgggacacctgtgatgttccaaggaataaaagctccgaaagcacaggcctgtgtccagctcagcatgagcaagggatcatgtcatgagtaccttctcttgggtatgagattcagggcttctggatttgttggaccagagcagagcttgaggaggagttgctgaatggtcctgaggcctggaaagcagtgtacaccaagagtggggaccaagggggtggctgtggcactccagctgtgctttttttcctaacgtgctgctttgatctgctctcaatcagtttcccacgtggcctccggaaatgagctttatccaggtgtttccagcagggaggacatgggagtctttcatgcttcctctccgcatcctcagctctgggcaggccaggtcagtggccctgttcagcagcctggctgagggctctgggctcctggtgcacaactccagggggcaccattcatactgtaaatagccccttggcggaggggagggaggacaggcactctgtgggtgaagcagcctcctcccacgccagcacctcttccccatttatagcccctgaacctgggggctggtgctccaaatgtacactcagctgcagcagcccctgctgtcaggggctttgtttctggcttccactcagcctgaaccagattttcttccaccttccctgaccacatgccccctctgcacccccatacactcaatacactaggcttctacctcatggtccctcacccaggctaggctcagacctctggttggagaaaggaaagaatgaataataaatggcaggcactttctaaccccagaagtgcaggaagtgctgctggtgtggcttttcttttgttatttcagccccaagggcctgtgtgtggagcagctccccccatcctgcatcctcccatttacacatccctggctgaatcctctccccacccccatctgctttttgcctgctgcctggctcttcggggtaggctccccctttccagggcccagagcacacagctcaccttggggaaaggaagtacattttctgtgccaatccgtcatgagcccctgagcctaggaagagactggctggagcccccacccctggtcatcactgaaaccgccaggcagtcctggggaatgcagtccctcccctcccccagcccctggccacatttcacgtcctgcattagccaagctcctaacccatgtccaaatttggcctccctgtgacattcaggcctgctcgctctccttctccctggcagggtcagcttggtgaatgattacacagaagacttcggtctcagggatgcagctcaaagcaaaacaccagtctgggaagccttccctccccagctgggctgggtctgctcttcccagactctatctgttgtcccataaagcccctcctttggttacatgattataataccctgtagccacacttcacagcccctttgtgcatgtatacattcattgcaagctcacagaagctttgtgaggtagagggcaaagatattatccccccttaaagataaggatattggcccagagaagtgaaggagcctggccaaggtcacatagtggccacagcatccccacccccaacccctcatcagtgccctctgttgttctcagtatccttggtgcatgaataagaaagtgctctggagagcataccatatgctgcccacacccagggcaccagggcactcggacctgagccagccagggagggtggtgcctggggtccccagcaagaagctgagtcagagtagggggagtgcagggctgcaggagcatggtgtgaaacaattgaccaaaagatggaggattctggggtttcaaatgcgtgttcctcacaaacagagggaatggacatttgctaagcacaaaagcataccattgtcaggtggtgtttcttgaaaatcccaccaacagtcctatgaaagagatctatttaactgacaccatgcttattttaaggcagatactgttctaactagaacattaatagaagctacatcatgacccggttataatttgtaccaggtccttatatgtagacatatacacctcagtcctcttagcaagcatatgtggtagcaactgtcatcactcccattctacagataaggaaactgaggcatgaagaggttaagtaagttgcctgaggttatacactggtaagtagtggggttatgatttgagtctaagtatctggctcctgagcccccacaatatccccagctttaaccactctgctatctacctctggctttagcttggatttaccaaagacaagcaagaaaaggtggaggggcaggacctgaacccaggcctggctgagaccctgatgcccccctcggtctgcaccttgactcctctcatcacgtgcgtggtccttactgctgcttgctcacccaagcacagacatcctcagcccttatgttctggtcttgcagatgctttcttatctcagggggtccttgctctctgcctcaccctctctatatctgataggaccaatcagtcaccagttgatgcaggacgctccctccaggcagtgctctcgttccgggcaagctcacagctctgacaggactatggtggctgcctagggtctgataagccaaggccagggcaatggtcacatggcactgaggtgggcaacctgtggtgcgtatggcaggtgctccgggacttccagggagggggtcatgtaactgtagatctcaagcttagccagtctaggagaaagtgaaagttgggcggggggctcagaagagcggctagctggcagcctgagtcacagtccagtgggataacagcatcgaacaagagggagagaaggactgcctgcatcttgaactcgggatcccaggtctgccacttttcaagctatgtggctttgggcaagttacttaaccactctgtgtcagtttccttatctgtaaagtgttgataacaatagcttgtacctgctttggatgaatcattctggagagtttatgtgttagtccatataaagcacttcaaacagccaggcaagcaataaatgttaactataataattattacatatacttttacataaatttattataatcattactattaacatatattgtacatgtactaagaaataattgtacacatccacaaaggctttcaatgtcttttttgcttggtgaattctatcctcagctttgtttctccatccactgtcctgccaggctggacacaacaggccaagtggtgggtggccgtctgtctgcccccagggacactgggcctgtcttctctggctgcccctcctagagcagtcccttctgaggcgaagtcatttggccacctgcctgatggctggcagtggccctcactggggtactttctctttctgggaacaagtattcctctggtgactcactagcagcccacaaacctcttcagtccctctccccaggccaaactcactttctttctctacttcctgcatgctagtctctttccagattggtccactagcatgggatgttagcagagagagcgttcacatctactgtggatgtgctgtgccccaagcactgtgctggagttgctagtgttttgtttaatcctcccaacaccgctgcaaactgtcctcattcttttgattgcacagaagtggaaacagacactgaaaggtccaatcacatgcctcaggtcacaccactaggaaagggtggcctgggacagaagcccaggactgtctgattgtttccactatgcacgatttctcccctgacaggccctaatcatggctgtggtcagaaccaggactgcatgtgggttctaccctcttgctggatacacaggtcccctgtcaattccacctggtggactgggatatccgccggacacatattcttaaatgaatgtgaagggagagggaagaaggcctcatctatacttccggaagcctttggacattgacaaatatgccctgaaggagtcctgtcaactcatgtagaatgttcctctaaaggtcagtgtcactgagcagagaggcaaggtttgtttgcctcctggcaccccatgtttaagtcttgggaaacacaaaggaccagctaacattaggagaatgtggccagaggagaactggcccaactccagcagcaagagatgattagaagcatgccttcctcgatggtcaggaaggtagggccacaaataagtagtgacaggggtcacaaactcatgcacttccagaaacgtggcaggtggactaagatcaagctggaggggaaatcctatgtgcatactgggagtgagctgagggggggacacctggtctacaggtgccagacggtcagtgttaggtggaaaatctaggcccaggtgccacattctctgatttttttcaagagaagctgtaaatccagatttatacggaaaagtcttctaatatttaaggtacaattttgttataaaacattgtactgattaaagacaacatgtctgtgggctggatgtgtcccagagaacaccagtgaccgcttctgagacacagtatttcattcaatcctggagaccttgggcctgggctctctggagggcagagagccagtgtcctctcccttgggctcatcaggcagcacctgtcatcagtgactacaggatggagtgagtgggagagctttagtccccttcccccttaacctctgtcagccccgaaacactgcaataagcatgaaactcagtttccaaacaggcccctcaagcccttccttccaggctatggctcctaagctggccccatcacctttacagtggggctggagtagcctggggtcccgaggagctgccctcacctgaagcctcaggtgggatgcagatctagctatttgtaaacaagccctaactaacattggtataagcatgatggtctctccactcacataatagttgaatgtagacagtcctgactggtaagactctgacccacaggctgtccaggaccccagctcctcctgttttattgctctgttatccccagaagttccctttgacaacgtggtccatgatggcgcacgcctctgtctatattccagccagaggggaaagggggccggggaggcgtgccgcttccctttaaggacatatccaggcagttatatacagcccttctgctcatattctgttggtcatcaattagtctcctggctacattcagctatgagggaggctgggaaatgtttttatttgggtgaccatgtacccaagtaaagtgctgtggaaaatttctgtggatgaaggggagaacatatactgggaggtggaggtcaggtctcagccacactctccattagaacttaattcctgataatgtcccctcgggaggaagccctattgagttactaggcctcagtatgaagtctgcaagggaacagtcagttatctgattagggagaagtccaggtcagtgaacatcagccagactaggaagttggaggctgggatgaaaaggaggcctcaggaagtgtccaggggtcagatcaccagcagttgcttttctgatttgcagaacagatgtggggagacccttttccttggatgcaagccaagggaaggcagaagtcccttggaatgttcctatggaggtattagttataccccctacagatttccatttcctgtggtgactctgaaggactggagctggggtagggtggggtatgataggggcaaaagcaaagccaggaatcattgtgatagacaggaaaaaaaaaaaaaaaagaaaaagaaaaagaaaaaaagctttgtaatatccaaaagtccctctagggggcagtactatcccctttgagaaccactggctgaactcaccagtgggcagaacccacacccgggagccacgtgcagtgtccactataccaatgccaggccagtcctgtactacacgctgggaatacctgggtcactaagacagacttggtctctcccctcgttgaccaactccacagtctagctagacacgaaacgggtgattacgctaatagttattcctgaccattgtgatgcgtgctaagaaggaaaagggctgctgtgcagtcatttgccagagggacccgtctagaccccaggatatcagggactgctttcctggagaggtgatctttaagctgaggcctgaagtatgaataggtggttctgcaaagaaagagaagaaggcagctggaggcagagagaacagcggacctcagagctgagagggagcttggcatattctagaaactgacgaggcaccggagctagagctaggagagcgagaggtggaatggccttgccctttggcccgaggaaatgaatctgggcttcatcccaagagcacaggaggcctttggataaacctcccaagaggcttttagcaggagattgacctgatcatatttaagatcacctggctgcagtgtggataatgggtcagacatagccagagtgatgatgtgatgaggcgactgaccagctaggaggcacctgcagtggcctgggcaggagagggtggtggtaagacttggtggagtcacttggatgctgtgggcacacagatggtaccaaagtcacaggggtcagtaaggatgatttaggctgcaagcaactgaaatcctggcttaaatagacttaaatgagcagagaggcaaggtttgtttgcctcctggacaccccatgtttaagccttgggaaaatcaatttattaaatgctaagtagtcttaaggggatcagctcacttaactggtgtccagagacccagtgagctctgggcatatagactatacaactctgtcacaggatcctaagggtgttgctttttccagctggaaacctctgtggctggtagcacctttgcctgaattttgcttgggcccactgggctccttctgcccactcagcctggcaggctgtgctcagctctcagtaccagccctgatcccacgcctgcgaagggcgagccaggcactgaacagcaaggggtgtgtgagtgagtgcagggtccagccactgcgcacagccaggcatgccagctgtggtggggcaggcagctccaggtgctggtacaggcactggctctgtgccaggctgcggctgggccaggcatactggaaggggcttccactgtggctactggggaatgtggtggtgcccagaagcttggaggcaccaggaactgcagagccccaaagagggtgtcacagccatgtcacccctaggtctgggctccccaaagtgctgaagctttatctcgttctcgttgcctgcaacatggcgagcagggttggggtggggggcaggctgtttcagccttgtttgtcttacagctctttcagtcctgctgttcagtgggtcctgggtccttgtcctatgtccaggaagaataggtacacagacaactggatggtgagcaaggtggagagagcttcactgagtgacagaacagctctcaggaaacccgaagtgggtagttcctttctgcaggcaggtcctcctgataagtgtctagctttcagcagagaggagacccacatagggtagctcgtcaccgcaggcaggtcttcccgacaagtggaggagacctgacctggagtgggtagttccttcctgtacctggtagtcccaacatctgtctgagtctagctgagtcctgggattttatgggctcagaagggaggaagtgtgtgctgtttggtccatgggtgaccaggagcaggctgggggaaaaagcaccataagttctcactctgggctgaggactccacctggaactggcagcccagcccccaggcttcaggccatccctggcttgtaggtggggtttcactgaggacccacccctttctgcccaggagcctgtctgcctcctgctgccatcaacatgtcgtctagggcacctaggctgttcatgcagaggggtgcttgcagttccaggtggagctacccctcagcttccctcctgagcttgtcagtgctcaaagtctggagggggttgaggcagcagggggctggcatctcagtgccaccacaagtgtgcacacatctggctgggttgcaacagcatgtgggcttggacacaactttgctccaccctggagtgggtgactggagttgggagaggccagagatggggcgaaggcacttctgagcctgcaagcttcctgggccccagagagtgcagggatgcctggatctggggccgcagccaaacggctgcagctgtgcctgggagcttggggctcccaccccaccaacttggtagggggcggggctcccacctgttcccagcccccaccggctctgcagagtgcacaacactggccagactctccactgcagcccacgtcttggcagtggccactccagatgggccgctgctgccagcaactccatagtatcatcctgtacccaggcaggctccatgtttctctctgatctgctgtccatgatgtctgctatgtcctcaactggtcagcaattggatctgcaagcttccttatgcacacaaagcaggagagggagttgggcttctctattcatggcatataaatctgtctttccaggggaacaacttaggacacatacctctagctagaccaatagccgttgccaagaaatatgctcagatagagtgggatccatcctggagctggggctgcataactgagcagtcaggttctgctagaagggaagggggtctggatggatgttgagggaatcaaatgtccgcctcatcttgaggggagaagagaagggtagagctgggaggaagcagcaagggtccaagcagctagagaaggcgttgtgatgagaacaggctcagactctcctctctttccttttccccacccccatgctcatcctagctctgtcctttaccgaccttccacttcttgggagctgtagatgtggttgccaccctctgtggtctctaccccttgactggaagctccctgagggcagggatgtgacttattcccagcaagtcagaggtgatgggtgaatgtttattctttcagtccatcatttagaaagaatttatggagaccatgctttgcaccaggtgctgtttcaggcactgaggaaacagcagtggacaaaacagacaaaaacccctggctccttggagcagacattctgatggggaagacagaaaacaattaagacacatgtgctatacagtgattggtgctagagaagaagcctgaaagggagatgaaagagggaaagttgtggtgttcagttgtgtggccgggttggtctcactggagttgatatctgaaggaaaggaagacatgccagccagagggaacagctgacagagaccctggggaggcgctggtctggcctgtctggggaacagctggaaggctagcatgggtcctggggaggtcagagaggtcagccagggctttcaaggtcacgtaaggggagagtggctggagaggaggtcagcgaggtcagccagggctttcaaggtcacgtaaggcctttgagttttgcactgagtgagatgggagccaacggaagactttgagtagaaccaggtcatgagaattgaattgaggatagaccatggggacaagggcagagcaggagacgcattgggagtccatggagtcgattaaatgactcaggcaagggatgacaggcttccactgggggcagttacaatggagatggtgagatatggtgggattttggacatattttgaaggagagtgggagggggatttgcagttttggtgacctggtggggttgaaggtgtcactgggtgggttcaagagagaatggaggagggagattggagacagaaagtatggagagctccttcaaagggcattgttgtgaaaagggagaaatgaccagtagctgaaggggatgtggggtcaacggtgtgctttcttgagagcaataacatcatgcttgtgtgccgatgggatgatccggtaaacaggggaacttggtaaggcaagagagtgagagaatcactgcaggctcaccactgaatgggcgagaggggatggggtctatgcccaagtgtccagttgttaccagtggggagtacgggtgattcatttgtaggaacaggagagaactcacaggatttgggcacagatgccgagggcgggcgttagaaggagactggggacctgaagaagttctctgctccgtaaagaggaagcaaactgagagtgaggttgggcgatggggtgtcctaggggcatccgggagacagggagacaagacatatagtatgattgcccccagcagtgagggctcgcttgagttaagggtcatgactacaaaaggcaccactcaggccggctgtgttactctccaacacagcactggttgggggcaggtgtggaggaggcggagttggattcgccagggttatggcttagccctgtgagaatgctgtatccctcaaaataagagaggggaaagggagttgagattttgcgcagcagtgcgtttaggctgagtgagcaggttggttagtgaggacttgggcggtgggaagacggacagtgccctgacaggggctaggtgctggagtgctgggggatagaagtgcgaagccagggcccctgtgtcaagaagttcatacgctggaaaggaaccagacataataagcgaaacgactgtcaccgttcatggcttacaccttgaacagctttccactgtggagactagggagtgtagagattgttggggatgggggacttgcaggggacagaatgggccgcagctggaccctagttctccagggaacgcagtatgatttgaatacagatctctgcctccagagatgagtgactcgacaccgctgcggagaaggctccgaggagggttggtggggactcgaacctcggagtctctcccgacccgggggtcccagcaaaccagaacggccacctagacagcctgcggacgggagaggaccggctccctggcgcagatcatggggcaggtggagagaggcgagaggcaatgaggcggggggctcggggtgcacggcacgctccgcacactcccccttcagcgctcactcagacttggtttccccgaagacacactctcgtccccgccgctgattgcccactccttccgcctgcactcctgcctccttctcaccctttcgtcgagcgcacagggcggctgccaagtcggcaccggtgcgcaccgggcccgggatccctggctggtgtggagccttggtcaccggaggcccccgcggagcaggccccacggcgccttgtgcgctctcggaggccgagctgcgcgcccgcgtcagcggcgcctcgttcctggccgggagctgggacccgcggagctagggaccagcacccccacaggcgcccgtctgacccctgtccctccccgcccgccgcgggcagggcggatctgggtaggggccggagggggagggtccgcccagcgggtgtccggtgtcctccctgcagcctctcccaggcattggtcacttctccgcggaggagcagcgaaggcgacagctctcttggcgcggctgcctgggagccgggcgcttgctgggtgggtgctcgggcccggtgctcccgctcccgccctgactgcgcgcctgtgtgccgccggggctgcccagccatgctgtgctgcctgctggtgagggccagcaacctccccagtgcgaagaaggaccggcgcagcgaccctgtcgcaagcctgactttccgaggtgagagccccgtggctgccgcgcccatgctcgggtgctacccgactctcggcgctcactggcgggtctgaagcccctgctccggagctaaccctagtccaggccacagtttctccctttgtcagcagggacggaaatcccagccccgacttctgcaggggggcgatgaggaataagcagagcacaataaatgccacagggctttgaaaaattggaaaagcgaaagtgccgtaggtcagcggttatcacttttctaagactgacacccagaggaaataaagtccgagcttttactgggtagtggggataagggtaagttggaagatgggtgcagaaggtagagaggaatcagggcctctgaaaaacggggcgtgtagatgatgtgctttgaaagttgtgtcttttttcattcattcattcattcattcacccatctttatccaacattggctgtattgaatctgccccgtcttaatcagtaggaaaaggaacagaataggatggaaatggccttgacacaaggagttttgaggaatgtcaaggatattttctctaaattcaagaagctaagtccctacatgtagtgcttagaatacatacaggtatttctgtgtggggcagcagagaaatcacacacacactcctcttctcaccaggcgtcctgaaccccctcccccaacccctccaaggcagattcccactggagcgggtgtctcaggaggggaaagggaagaggaaggatctgtcaaaattaagagaaggaacaatagctgtgagtcaggaccccagttctgcagagaaagataaatcaggagaggaaagagggtttccacttagccaggagccataccctgtagctttgtggaatcgataataataataataaaaatctacgtatcagaaaagatagtcaaatgaagaaggaagagtagctggtgttttcataagcctccttcagtgcaggcaccaagggaactcttttcagtctgacccatgatctgaatcatatctccaagcacccccaagataatgatagatgaaagacatgatttggcaaagggagatttatgtgtagcttttattctttgctgtgggacaagttatatgtattcctcttttgaaagatgtgatttgaaacgtttaagaaaatttcactattttcattgattggtgacatgcctgggagttcactatgcaagagcaacttcaagacaaagtctttccttctccagtgtccacctgatgctgcctaaggctttgctatgcagaaattgcggtgtcaccattggctggaaaagaaattccctaaggacactgggcagggcacacattagcatagggctctggatgctctaacactcgtttgggtctgctcacagctctttcccttgtcctgtaacagtcctgtggtggctaccaatgtctccattctgcaaataaggaaattgaaacccagggaagttaaatgtgttcaggtcagtggtcatggcagggagctaccagcgcttggagtgggtattgcccttgagtcgggaagatgaccaaatcccttgaggcccctctttactattgccctcgcccaagtaccccgaacacgtgcagctgctatctccccccagatctctgtattccttctttgtaatgccttactatttatttgcactgatgatctcctcggaaaacagaaataccatacaatagaatgtaacatctccaaccgtttcaagtctatttgtatttcaaagcccagggcaatgccaccttctccaggaggacaccctggatccccctggctctcaagagtctctcctctctggatgacaagcagcagcaccttgctagggatgctagcaccctcgccctgactggcctgtgctcagctccatgcttaggtgccttgagagcagtgacctgtcctatttgttcattggtttgtcccagtgctgagcacaagtaggtgctctctagtgtttgtgcgctttctggcccagcctctagccatcctccaggtgtgcctgggagcttcatttagtctgggacatggtccgctcacttgattgttcctgagaatcacttgtagaacgtgtttgagaaacagattccagagtccccatctgtagaggttccgatgcagcaggtctggaaggtgacctaagaatcagcacttaacaaatacccgatgcaggttattttggaaccgcatcttgggaaaaatgggtctgagatgtgatggcaggtgaaattaatgcgctccccattgcgggagcattcactggggagtttggggctgagttgatgcctaaggagggaaaccgttagaaccaggttcagaacttacagagcatgtaggctggggggactcaactctggctgcaggtcaacattgtgtgtgggagcttcaccaaagaccactgccaacctccctgcctgccttttctgaagccagatcccttccggtggggccccaggcataggtgttgtttctgtcaaatttccaggtgttttgaatgtgcagtcagggttgagaaccactgagcccagctcctcatggcacagatgggacagtggcctgcttgcagagaagccagcctgcactgtgtgtttggctcctacaggcagcctgaaatgtatggggctgggctggccccactttccttgcagttgttccctgtctcggatgtaatttcaggacctgcctcccaaaatagactatgagctctgggaggctggactctgagggcaattttttggcttccctgtctaagcacctctattaatagtagaggctactaatgaatacttctcattcttttgtttttctattaattaattcattaactaaaactaccatgagtaactgggccatagtagatatttttgactgattgtgtcaacgagcagcttaatttcctatagcatttaattgtctgtacttcttttctgccctgcccattttccattccttaatgtgattatttatatccctctattcatgcagttagttcattgaacaaatatttactgagtacctactacgtgcctggtgcttttctaggtgcttggatgcatacaagaacaaaaccagatccctactgctttaaagctgaaacatcttatttccttgaaggccagatctgctgcgtccccacttggtgaatttctgccctgtgtcatcagccaggaacccagaagtcattactgacacttccctctctctcatcctgtcagggcgtctcctcctccagcctccccctcccacctcttctcttcttgatctcctgggggtctctagatttggggcaggagttgggggatcttatagaactagttggaggtggattcctgtcgtcagggaacactcttaactcacctatgtagggaaagtgggctgaaggccccggactctctgaacctagctgtttacatattacaaatgacttaaaatattgaaaacagcggccaggcgtggtggctcacgcctgtaatcccagcaatttgggaggccaaggcgggtggatcatgaggtcaggagatcgagacaatcctggctaacatggtgaaaccctgtctctactaaaaatacaaaaaaaattagccgggtgtggtggtgggtgcctgtagtcccagctactcgggaggctgaggcaggagaatggcatgaacccaggagacggaggttgcagtgagccaagattgagccactgcactccagcctgggtgacagagtgagactccatctcaaaaaaaaaaaaaaaaaaaagaaaagagctttctcttctcttccttctttccttccttccttctttccttccttccttccttccttccttccttccttccttccttccttcattccttccttcttttttttttttgaaatggactttcactcttattacccaggctggagtgcaatggcacgttgtcggctcattgcaaccgccgcctcccaggttcgagtgattctcctgcctcagcctcccgagtagctgggattacaggcacctgcaaccatgcctggctaatttttatttttatttttagtagagatggggtttcaccatgttgcccaggctggtctcaaactcctgacatcagtcaatccacccaccttggcctcccaaagtgcttggattacaggtgtcagccaccccgcctagcctgttttctttttataaacataatatgtacttgctgttaaaaatgacaaactacagaaaggccatgaggcaagagtaaaaaatagccccaaatcctgccactttgaattaacttgttaacaatttgacacatttcctccaagattttttttcttaaaaattttagttataaaatttaacatacaaggaaagtgcagaagatataaatatatgatttaatacagtagttctcaactgggggcagttttttcctcagatgacatttgccaatgtctggagacattttgggttgttgccacaggggttgggggcacagggtgtttatctacagggtagaggctgaggatgctgctagacattccacagtgcaaggggaggtcccccacaccaaccacagagtgattcagcccacatagtaatcatgccacggttgagaataaatatgtgtgtgaagagaataactatgtaatatcacccaggtcaaacaggtcaagaaatagcacctggccagccccatttctccaccagaagtaatcccatcatagattttttttttcccaaatgtttgcacatttgctgaaaaataaaccagggggccgggtgtggtggctcacgcctgtaatcccagcactttgggaggctgaggtgggcggattgcttgaggccaggagttccaggccagccaacagggtgaaaccctgtctctactgaaaaatacaaaaattagccaggcatggtggtgtgtgcctgtaatcccagctacttgaggggcagaggcacaagaatcgcttgaacccaggaggtggaggctgcagtgagccgagatctcaccactgctctccagcctggatgacagaatgagactcagtctcaaaaacatcaattaattaattaaaaaaaaatccagggtcattttttatgtcagtaagtattcttctataacacctttataaatatctgcgtaatattttcttatatggatgcaccatcattaatttactcaaccccctactgatgaatatttaggttatataagtgtttatatttatatccagtgcttaaattatacagtcactgtgaggcatattctggtgactacatctttggccacatatttaattatttcctttgggtaaataccagaagatgaattgctatgtcagaggttatagacagatttaatgcgttgctgcatttcccaaattgttcttgaagtctgtatcaactttatcctcctgtcagccaagtatgagggcttatttttctaataatcctgctaacacacagcattgtcctgtaaatctttgacactttctttcttttttttctttttgacagagtctcattctgtcgcccaggctggagtggagtggcgcgatctcggctcactgcaagctctgcctcccgggttcacgccattctcctgcctcagcctcccaagtagctgggactacaggcgtccaccaccacgccaggctaattttttgtatttttagtagagacggggtttcaccatgttagccaggatggtctggatctcctgacttcgtgatccacccgccttggcctcccaaagtgctgggattacaggcgtgagccaccgcgccaagccaacactttcttaaggttcaaatagtatttgtgatacttcattgttatcacctattcgtatttattcttactgaattactttttcatttgcccatggtggagcatgtttgtctttttcttcattagttgcaagtgctctttatgtattgagaatgttaccgtttttgtcatagatgtttctagtatcttctccagttctgtttgtttttctttaattggcaagtaaaaattatatgtaaatatcttccccagttctaatgtaaatatcttccccaggccttctgagtttaaagactactcttcttgaagtgcatttcaccctggctccctccctttttggccacttctgtggttccagctaggatttaggaaggtggggtggagggtggttgacggggagaggagcagtgctctgctgatgataggggagacagctgcccagttcttggggtgtccaggcctgagaacaccatggcagggcaggtgtcagaatgaccatctacctctgctttttgtttgggggtgtctgtaccaagaggtaatacaggccttccttcagcccacgctagggccatcttttctcctttcacttgctgctgcctttgggttttctgctgattctttgaatttctgtcactttcttggtcttatgtgtattctaatggggccgtcaagaaacgccctgcacaaagtaagccctcaataaatatctgggggataagcaagagtctgcatctaggctgctgcaggatccaaagccccctgcagcttctgagagtaactcctgttgcctgactcatgggcagatgcagctgtctctctgtctctctcactgggagtctgagacaccgcaactcctctccttctctctgtcccctctctaggagggacatccgagactgggagacatcttctgctcctcctgcttcccattcgccaagccgatactggccagtagacctcaggcccaccacctgtgtccattccatttcccacctggacttaaaaaaaattgtggtaaaatgcacataacatgaaatgtaccatcttagccatttttaagtatacagttctgtggcattaatcattgtgcagttatcaccatctccagaacttgtcatcctccccagctgaaactctatacccattgaacactaactccctattcccctccctcaccgcccctggtaattgcagttctactttctgtatgatttttttttttttttttttttttttgagacagagcttttctcttgttgcccaggctggagagcaatggtgtgatcttggctcaccacaacctctgcctcccgggttcgagtgattctcttccctcagcctcccgagtagctgggattacaggcatgtgccaccacgcctggctaattttgtatttttagtagagacagggtttctccatgttggtcaggctggtctggaactcctgacctcaggtgatccacccgcatccacctcccaaagtgctgggattacaggcgtgagcaaccatgcccagccgattttgactaccctaggtacctcatataaatggaatcacacactatttgtctttttgtaactggctgagtcactcagtctagaggaaccctcagggtttcatcatgaatcttacacctgttgctggtccccagttcctcagagcagtttgggaagagggcatggccccctttcctcacccagcataagctgtgagctctcctgtatcttcaacttctgttaaattacatgcataaagccacatctctcaaggcctaaattaataatcaggaacagggcaggccaaaatccatgatgaggaactattttcttaacagtttcctaattatcaatgtgccttcccttttcttggtgcctgtaaatcacgtgattgtgcttagtgaatgtttcgtttctttctttctcctctttggggctgcagcacccatgagtgaccccttccttcatgttacccagagggtcccagagttggcccttctaaccaggacttagtgaaatctcattgagagcttttattctcctcatctacagggaaggtaggaagtggaaaatgattaaaagatatttagcacagggcttggcacacagatatcgctcagttaaggaagcctggagcaccaggaaatgagtttccaagtgtgcaactcatgagaggctgcagatggaattttccatgttactcctgtaggtcacaggaagctgatctgtgataggggaggggaagtggacacgtagcttgcatctcaggccccctcagaaccctgtgcagcagacacttttattatgatccactgattgctgaggagcaaggcctagaggttatgagtcctccctaaggtcacatagtagtggctgttagttgagtgactccaaagcggtgtgtctgactcctgctggagccacaccaatatgggccacacagaattcaaagtggttcagccaggacccttcccccacatggcgcctcctttcttcctccctccgctgacaaacagccacaccatgaatgaagtcttggggcgttccctggaaacagcgcttctatcctcttgtgaggaagtcaacttgcagtcaacgtggaaagaaaaggacccattcattcagcacccgattactggccacctcgctatagactagggttacagttagtaatgtgagtaaggcatggtgtttgccgccagaaactcccagcccagttgggggttcagagctagaagcacactgctacacggctgtcctgcacatgtggtcacagcatggttagggagcaccaaagagagatcagctacctcttttgggagagtcaggggagtcttaccagaggagagacaaccgtgctgggtattgaagagtcagtaggagttcactagatccatcagagtgggcacagaggggagggcaggggaaggaaactcacatgtaatcagcatactatgtgccaggcacctcaacgttctatctcggtaattttcacagcaaccccttgtaaggtagatattatgatgatgaaattgaggcagaaatgttaaatgaatttcctaagagattattttattttttagagacagggtcttgctctgttgcccaggctggagtgcagtggtacgaccacagctcactgcagcctcaaactcctgggctcaagcaaccctcccacctcagcatctcgagtagctgggaccgcaggcacatgcaccactacacctggctaattttgtaaattttttgtagagatggagccccactatattgcccaggttagtcttgaactcctgtcctcaggcgatcctcccacctcagcctcccaaactgctgggattacaagtgtgaggacctcactggcccctaagaagttcttaaagtgttgtacatggaacttggggggatcctcaagactctttgagcaggtcagaaggtcaaaactccttcacaacaacactaagaggctatctgccttttttactgtttggacatttgtactgatggtacaacagcaatggcagctaatactactggcacctgatcactaatcgaggccttggcaggctgggtgtggtggctcacacctgtaatcccagcattttggaaggccgaggtgggcagaccacctgaggtcaggaatttgaggccagcctggccaacatggtcaggctaaaaatacaaaaattagccaagctaggtggtaggcacttgtagtcgcggctactcgggaggctgaggcatgagaatcgcttgaacctgggaggcaggggttgcagtgagccgagatcacaccatcacactccagcctgaatgactggagtgagactccatctcaagaaaaaaaaaaaaaggccttggcactaaattgtgcttcttgttgtgttttttagattgcatgcactcacagttaaaaataaaaaggcagtttcatttaagagtgtccttgatgaagcagtaaaaggattagtttgaatcctcctgtacatgtgttgagaatgttctgtgtgatgaaatgggaagtatgcatagtgcacctctgctgcacatcacaaaatgatgattgtctccaggaaaagcactggagtcactgcttaagtgacaaaccgaactagctgctttttttttttttttccatggaatactgtttttactttaaagaatgactgacaaaactatagttatttgacctgggcattgggcagatattttcttaaaaatgaaagagtgagcctgccatttcaaggaaaatggcttgaaataccacttgctgccaatcaaaaaatttgagcttttcaagcagaaattggagttttagaaaactttgagaagtaacttccagcttcccagtactgaaagtgttactcccccaaaactctgggatttgttcacatggtgaataacaaacgacgttccatgagaatgcaggttttgatcaataggaattttattacttgtcacaagcaggagcactgggacaaagcagtgtctccctgagggaaagtgacaggagggttttatggggcaatggagaggggagagggtgcaacatcgcatgtagaggagggttcccggtggcacagatgctgtgagtcatggtgccagcacataggttgcatgttatggtaatgaagctacaggtctcctggggtgcaggctttagcatggtcatgaggaaagttcattggggttcatctgtaagttgccgggctctgtcaggagctggttttagcccactagatgaccgcctactacacagagcttgaaaaaaacaggctgtaagacagaaagctgtaaagcaggcagattgctcaatctccctacctgcttacagaaggctgatggtgacattaatgtatgagtgtaattttttggtagggcattgtgaaatgtgtcaacatctgggaagatctacgtaactgactgaacaaaaattttccaaatgaccaatgcaactgttacagaatcatacgtgggtgaaagattcattcaaactgcaagatagaacaatgaattttaatgtagcagagtacaaaatgttcattgatctggtttcagatttcacattgcaacttactgttaagaagttaagaactactacttgttgagttttgatgtagtatcaaagaaggatattcacagttatctgaaagtgtattaaaataggcctccctttccaactacatatctggttggattttcttcatagacatcaatcaaaatgaggagtctcagcagtttgaatgctgaggtattaatagatatgagaatccagccaagcattaaagagatttgcaaaaatctaaaagtgtcacttttccttttttgggaagttatagtttttttttttttttgctatatatgtgtcacttatgttaatatttattgggcttattgtgattttaaaattactaaataattatttttaaatgcttcagttataatttctaatgtaaaaattcatagatgcaggccacctaaataaaagctctttggcatcctcaataatttttttttttttttttgaggcagagtctcactctgtcgcccaggctggagtgcagtggtgccatctcggctcactgcaagccccgcctcctgggttcacgccattctcctgcctcagcctcccgagcagctgggactacaggtgccagccaccatgcccggctaattttttgtatttttagtagagatggggtttcaccgtgttagccaggatggtctcaatctcctggtctcgtgatccacccacctcagcctcccagagtgctgggattacaggtgtgagccaccgcgcccggcccaggcatcctcaataatttttaagagtgacatcctgtgaccaaaaagtttgaactgctgccccaaagaatcacaggaaataagtgttttatagtggcctgtgatttcaaatttcatgattttttccatgatcagtgattcacagtgggagagggagtttgggagctcccccctctccctggagggaggtttatcggaatctctgcgggactcactacaacgagcaaatatttacaagataattcccttagaatctccctgagcccctccctgcctccctccctccctcagatggtcttttgctccctctcacgtgctctctttctctttttttctctctcctcttcttcaaatcctccctcaccccttgcctgcctccttgatccctctctgcttccctcctcctcttctccaggctctgaacctggcagggcggggccgaccccacaggaggctgcacctctccaggctggatggactctgatgtgcttggctctaaagcctactggggctcctgggagatgtggccagaggctcgagggactttcgtggtccaggcaggactctctgaaagctgagccatccaggtggagaccaaaggctttccactgagtcttgcacaggttgggtggaatgaggtgatctttaagagccgacccaaataaaagttctgtgtcaggctgaaccctttgaattgtctgttgagcgccccatcgtttcttttcctgatgcttactggaagtgcccagggcactgcagaacaaagcttcattaaatgccttctcttcttctttgggaccttcaacactctttttctgtggatcagtgtcttcatggaagacgtgtctccagacctactgggcttagtgggggaacccctcaccctgacctgtcggtccacatggtgggccgccaagcagagagggccaaagctctgtccaaactccttgttttgtggatcatccagagagagaaatgcacttgccagcccagtaaaggaccaggggctgcagcacctgcctgtttctcccagcctacggctcttccatggaaatgaccttcctgcccactgctgtagaacctaccctaggaggagggtctccttgtgcgtctcctttgccacctttctttcaagcctcacctgcccacctcactggggacaggcacttgccccttcatgcccactgctccagaggaagggcttctgccgtgcatcgtctggggcacagtgggtcagctctcagccatcaaagtgttagttcttcttgtccacctcagagccattctgcattccctcagccagccctcccagccacatagagcttccttgggacagcttgcctcagatggactccttcaaggccttggagggtgaagtggattttgtttaaatggaaataaaattaacatatcataaaattcaccatttgaacaatttccacatatataatttaattggttttaggttgcaatattgtgcaaccatcatcatgatctaattccagaacatttttgtcacctcaagaagaaaccctatacccattaatcaatcacgtccccatttctattttccctttcccttctcttagcccctggaaacaactaatctgctttctgtctctacagatttgcctattctggacatttcttatagatggaatcatataatttctggagatggatgttgttcaaaagaggaatgaaatactttctagggagattgttcattgttagaattagaaggctggatgtggtggctcacatttgtaatcccagcactttgggaggccaaggtgggaggatcgcttgaggccaggagttccagacccgtctgggcaatatagtgaggcccccgtctacacacacacacacacgcacacacacacacatacacaccagcttgatctagtggtgtgtgcctgtggtcccagctactcaagagcctgaggtgagaggatagcttgatcccaggagtttgaggctgcagtgagctatgatctcaccatcgcactccagcctgggcaacagagtgagatgctgtctctaaaaaaaataatactacaatcagaaaatttataattaaaaaaattatttaaaaagtcagaaataacaataacaaactcattaaggagagtcagcctgggtactttcttttgaaagcatgtttctgatgtcccagagctgagagggggaagttgtgtgattggcattggggattcattgcagactggcgggttctcagggaatctgttgattttgtaagatttcccttggcgaccaagctgaagcacaggtctcagaagctgagcctaactcagcggaaggtgaaaggcgggatgtgtctctccattctcccttttgtgtctcttgtaggggtgaagaagagaaccaaagtcatcaagaacagcgtgaaccctgtatggaatgaggtatgtgagtttttctccttccttttctctctgtctgctgcagttgtgtctgcagggacaagttagggggcttgtggaggaggtgccttctcagcagtgtccttgaggtggggaggggctggtggtccagcctgccaacgaaatccttcttgctctaggaacctgggaggagggttggtggcctggcctactaggtaaatggaggggagctagatattttttgtttctgtttccccccagctctggccagccaggtaaagggtgctcagggactctcttgcctgcctgtttctctcacacaggctgttcctttttccttgctcaaagctcaccttctccccacagccctccctgatgaggcaggtcctcctctggctcctgctagcccctgtcccctcaaccagctccctgcatacatggctcccgggtggtcctttggaagccctgctgccttgcatggatggggtcggatgcacaggggagcctttgctctgaggagggtcatgggggcctagccaacatggcactaactcgtgctgcctaccagggcctggcgtctggatgagcccaataatcttggtccttgaggatgcttcagggtcacctggctttttcccagccacactcctggcttggcttcctggggatgggttgaaactgagttgggagaggggcctgtgaaagacctctctcctctcttctgctgtcttcagctcatactgtcacctctgaatttctggatctgtggtcttcatctatccatccatccatccatccatccatccatccatgcttccatccatccattgatccatctgcctatccactagaatcattcatgaatgcctactcagtgccctggtggcacgaaggtgaaccagacacagtctcttctcctagagggccataggttaagatgccttttctctttttcttccagggatttgaatgggacctcaagggcatccccctggaccagggctctgagcttcatgtggtggtcaaagaccatgagacgatggggaggaacaggtaaggtggccagaggggggtgctccatggcttgaaggtgcaggtaggattgtggagtatacagactgcagaatcccaggccccagggagctggggtttcaattagcatttatccacctcctcccatgggactggcccagtgatagatgttgggagaatctggctgtggcttcaggaactcagccatgggtacagctgagcttccaggctacaggggagggaagatgggctggaatcaggtgtccacgcatttgcacagacagtgtgtgccccagggagcaggaagactcgcttcctgctgctccagcccagaggctccctgaggtgggctctctttcccggcccagcccaggccagtgagggcagaggccccctgcaggaggcaggcaggcaggcaaagtgaaactgtagctagcagggagctttccaggaatgcttcatggaaggggtaggactagaggttaagattcgtggtttagaaatcagaacagtaaaaatgagtagcccggcctgggcgcttccctgtgttggggtttctgctgagtttttcatgtacctagtggtgggtttcttggtggggggatcaaagttgtggtggcaaaagcaggctccccctaggcaggcgatgaatcccttctcttgccattgagcccctgggccttgtaaacggaggtggtggggtggacaagttcaacccaacctgcagatgggtgggtcttggactggggctgtgggtggactgggagacatagcacatgaaactgctcatgatgagccttaagcatcagagtgggagtccggttgtccctgctgggcatgagaggaggcagctgcgttagatgccagcaggagtgggttcgtgcttcaagtgccatttacggaggtctaggcccaagcatcagggatgggcttgctgttttgtgacctgctcacaggggagcctttgtttgggaactgggtcagtggtgtctgaggcctgaaagcctggctgtgttgccctggggtggggcagaaggggttggggaggatgagaattcaggaacctagggaagggcaatcagggtctccggctgcaaaacacctggaaaatttgaaatgttaaaaactcagaaaaaaacccaattgccaccttctctctgtggctgtgctggccatgggtgcatggtgtggggagggtggggcactttcactgggcccccaaaagtgtggctgcaaggtgtggggcccaggcctgtgggccagggcatcttgggcccgtctcttccagctgttgacctcagacatctccacctgcacgggggacagggattggaatcatttcagctaccttccaacgcagacactgtggaaggcaaggcagccgctaacaagcatgaatggtggacccgcagatcagggagggagcagccctggacagtgggcagtcctcgaaggcttcctggaggagggtcactcagactgacttgaaggcaggggtaggctttgaaaaggccagaaggggagggtattccagcgtgtggatgtggcgggcagccaggctcaggtctcacaggtgggactcagtctcacgacacgtgcggccctgtgagaagtgggtggtggggaagaattgagaggggggtctccaatgccaggctgaggagaatagcagcaaagtcacacaactgccacacagctgagtgtctggccgcatgctgtcttatatacaagaccttttcccatcagttaggcacgactattgtaactgtcaccgttacagatggggaaactgaggctctgagagattgggcaactttcttgaaggctagtgatggcagagctgtgattggaaggcaggtttttgggacatgctcatagtcactgagccccatgtgcctctcggaggctcctggaagccccaggatggtgttggtctcttctggagagttcagttccctctgacaatgccggcgttgacagagtttagaggggcagaggcaggacagtctggttactgcaggtcatgcagcagaagcacatgtttcattttcattatcttattcagcatttttacaggctctgtggggagatttccctttttttttttttttttttttttttgagacgaagtcttgctctgtggcccaggctggagtgcagtggtgcgatctctgctcactgcaacctccacctcccaggttcaagcgattctcctgcctcagcctccctactagctgggattacaggtgcccaccaccacacctggctaatttttgtatttttagtagagacagggttcctccatgttggccagagcagtcttgaactcctgacctcaggtgatcctcctggctcagcctctcaaagtgctgagattacaggcatgagccaccatgcctggccagagatttcctttaaaaatttttaaaatcattatgggtagataatagttgtatatatctatggggtgcacgtgatgttctgacacaggcataatgtataacaatcaagtcagagtaactggagtatccatcaccacagacatttatcatttcttgtgttagcaacatttcaattctactcttttagttgttttaaaatatacaatagattattgttggctgtagtcaccctattgtgctagggaatactagactcattcattccatctaactgtgtttttgtatccattgaccaccttgctttatccacctctccctgctacccttccctgcctctggattctactctatctccggaagttcaattttttaaaaattagttctctgtagggagatttctaagaccacagaggcaaaatgagagctgtgaacatatttttggccaattcaaggaccaggctagccctcagggtaacggtaagtgagggccacacgcaggctgttctggctctgtggagcagaggtcatatggggaacgggaagcttcgaaccttggggtcctcccattggcccctgtgggtgttctctagctcctgggggcagctagctccctaaaaaccagtgccccatgtgagcagttcactgcagggctgtgtgccagaaatcaggtcctcaaagatcagtttatgggacagccaattcaccaacctcacccgtttaccagaaacacctttcttataacatttaaatgtaatttttgatttttccaaacatttatctcagtttcagatttctagcaattaaaacttgtcttaattaaactagattgaaatgtgcacgtacattcataaatacttgaggactctcagaatatgccaaagcaacactgtcatgagaagaaatgatagaattttggctccatggctgggcattgtggctcatacctgtaatcccagcactttgggaggccgagggcagcagatcacatgaggtcaggagttcgagaccagcctggccaagatggtgaaaccccgtcactactcaaaatacaaaaattcgctgggcgtggtggcgggcacctgtaatcccagctactcaggaggctgagacaggagaatcgcttgaacccgggaagcagaggttgcagtgagccaagatcactggctttgtgccaggagaacatgggatgtgtggcctcctcagctgttttcaggcaggtgcgatgcctcaggggagggagcacaggtacctgcaaggtaattctgtcaccccaccccatgaccagatggcaaagtacttccaccctacacatggatgtgagaaaacaaccaaagacaagcagcaatacaaattccaaaagtgtaaaaagaaaaccataccagggagtaacaagaatgaacgcatgacattttaaattttgaaagaaaaggaaaaaacttcagggaatccagttcaatgagcattttatgtatttatttttgagatggagtcttgctctgttgcccaggctgcagtgcagtggtacgttcttggctcactgcaacctccgcctcctgggttcaagtgattctcccatctcggcctcccaaaatgctgggattacaagcgtgagccaccgcgcccagcccttcaatgagcattttaaattgaagacctcctcactgccctccagtcctgcctgttgggtcaggaagcaaacagggactcaagggttaggtggctgtgccttgcaactgtcctcaggcctctccagttggtgggttccagtgagggtccccggagtcatcatgcagccacccgttttgtttgtgggaatcctgggcgtgtcttctgtgagctcccccgctgtccaacctcatcctcttccaagtgaggggatcacagccctctgcatctgttaaccctctcagtccccctccaccttgcctcccctccctcttccccacctccaccctctggctctctctgcttctagatttcccctcaggcctccctcattctttacagcctgtcactctgtctctgtgtctcctgctttgcttcttttccttcctgtgcccctccttttattctttctctcctccttctcttgcccctcctcgatcctcaccatcctcaccgccactgtcctctctttcctatggctcctggggcatttggcatttctgggttttccctgatgatcactggcagtttagggtgatcttgttaaaccagagtggtctgctggcccagagtgggatctggggaatcctttcatgcctcaggaaggaaatctccatctgggaactgtctctgggctgctcagcatgccattaacccatgagaggggcagccctaagcccgaggacccctgagccaacttcagggatggatcgactttatctggctaaaatcaggtttccaatgcacataaaaggaagctccactccttagggtggaagacactcaggcaaacctagcgggtggtcctgggatcctgttccaggctgcactggacaatttcctgtttactcgaggcttctcagagagaagctgaaggggagatgatccaggtccctgaccagctgttttgacccgtgggatgttcagcccagaagttcccaattcaggccacacaatagaatcacctgggcagcttttacacccactcatgcctgagccttggctgaggttctgatttcgttggtttggggcaaggtctgtgcagcatcacctactctccaggtgctggtgttttcattgcgcagcctgggctgagagccactgatctggactctagaccagcactgcccactagaactttctgagatgatggaaatgttgtctttgtgttgactagtgtgcctgagaaattgaatcttaaattgtatttaattttaatgacttagatttaattaattccacgtggctagtggctactgtgttggacagagcagctttagatttttggaacagtgtttccaacctggctgcatctagaaatgacctgggagcttaaaaaaaaaataagtgtctgagctccgcactaagctgattaaacaagaacctctggagtgggctgcaggagtcagcacttttggaaaccacccaggatggcaggggggcagtgtgcccgcagggtagagaactcactgtgttagagagatgctggcattttgttgttgttgttgtttaggcagagtctcgctctgtcgcccaggaaggaatgcagtggcatgatctcggctcactgcaacctctgcctcacaggttcaagcgattctcctgtctcagcctcccgagtagctgggattacaggtgcccaccatctcacctggctagtttttgtgtttttagtagagacagggtttcaccctgttggtcaggctggtcttgaactcctgacctcaggtgatctacctgccttggcttcccaaagtgctgggattacaggtgtgagccactgtgcctggtctgatgctggcacttctgaaaggaattgctctcaatttttccatggattagctaagaaataaatagaaatggtcattcttgtaattgtttatgtatgtgattattggcaaaataatcaccatcaagtaataatggctgaaactgcacatggtaaaattgttacagaactgaaaaacagatggaagaatcctgttggtaactgcaaacactgacttgggaagttggacttagtggaaataattccacaaaagaaaactcaaaatggcaaggagcaatatttgataaaacttaatgtcaaccaaaaaaaaaaattaaaaatctgtgagccaaatctgtgttgggaaatttaagcagggattaattgtccccaatgaaaagaattttggtaaaatgaaaataaagatggtaaaagagaaaaagaaaacagtttaattgctctgtatgcaaaacatatcaacacattaaactggcttcatttaatttgttctggaaaaatgccttctcagtggaaattaattactgtaggtgttttttatatttaaatgtttggtaaatataaacatggaagcaaaaatctccatggggtcaaaacatccacctggcaaagcaccatggtcaaaatgatgctcaccttgactgcagtgattcactaaccccaggcctaaccggtccccaagacagggggcccagatgcaacaaggaagcatacagaacaacctgttaaatgaggaggtctcaaataccacaggcgacaccttatattaaggcattaatcatcgtttctctgagatacagacttgagtgggctccctgtgtttttcctggtcactctaccctccagcctgaccgtgtccccagcctctctgctttaatcaagtgttataggaggaggtctagtcaggattgcctttaaagacgctctcttaggtgttcacagtggcattttctttggaatagtgtgatctactctgtatcttttagcgacctggtgactctgtaaagtgggcactgaggggcctctcacctgcactcagatgcctttctgccttcacccttccccatggtctgagcatcagtcatggtgcctgcaactggaggggacccaggagacaacctgagaactttcctgagccccaatgctccttctcctccttcctccttcagctgctcctcctcccacccccacattgagctggatgatctgccccagtggaataagcgtggactttgagaagagccagggtctagctgcaacactctgtggccttgggcagatcactacactccctgaaccttgctttcttccattcttagggagtatcaaatcaagggacctgccacaacgggggtctccctaaatgttagttctgcactgctgccttgctcttgttcccccgtgcttccttctgctgcccccaccactcaaagtcccactgacccagccctctcccaccaaaggctgctcttagccagctgtgggttgaaaaagcaccaaatcatatgaatgcataggtggcagcctatggcttcatgtttcactctattttaggaatcggcgggatgctgctttatagctcagactctgcttagaaaagagagaagtgttaatggtaggtgtccagccactgcagtagattatgaggagatattttaggaatggtgtatcttcttcctgacatagggccatctctgagcctggccttggtgccatctgggcggaggcaagggtggcctgatgcctcctatgtcaatgagtttcatttgttgagggaatgtggaggtttccaggaaggggctgaacatgctcttagttcttcagggtagccatgcatgggagacgacagaggcgcctggggagggggcctggccagttgaggcctgtctcccacacctggagtatgctggtgggattgaggggctctgtactgggaggggcaggtattctaattctcaggctgtccatcagagcttgcagggcaggggtggtggaatgagaatgagggtcaggggctttgctcagggaccccactgtcagcagagttctatcctggcactgtctgtaacctggacctctctgaaaccgtttcctcatcaggacaatggcaaaagcagtccctatgttgccaggttgctgtgaaatttaaataatataatgcatgtgtgtcaaatgcctgctcagtgcttggaatactgaaggtgcaatatatgggggctgttgggagcaggatccatatagatgcacttacgtaaaccacacaaacatgtgaacactatgtgcatggcccgtatggacacccggctgtacctgagtgtgcactagcattgcataatatgtgcacatgcatttttttaaatttaaaacaaccaaaaaatttcacggaagtataaaaaaacctaagtaatttttataagtataaaagtgcatttcattctcaaaaagttataaaggaaaaagtacaagttctcccatcttctacccatgaatttcttctcttttctccagaggtgcccattgttaacgatttggtgcgtatctttctttcttttttgagacagagtttcgctctcgttgcccaggctggagtgcaatggcacgatctcagctcactgcaacctccgcctcccgggttcaagtgattctcctgcctcagcttccggagtagctgggattacaggtgcccgccaccacgcccagctgatttttgtatttgtagtcaccatgttggccaggctggtcttggactcctgacctcaggtgatccgcctgcctcggccttccaaagtgttgggattacaggcgtgagccactgcgcccggcctggtgcatatctttctggacttttcctaagttatctacaggcatctgtttatacacatgcatactcatttacttatacaaaaatggaattatgctatatgtattggtctgcactttgcttttatcacttcatcattgactctttcccaggtcagtccatcacatttttaaatggttatgtggtattccgcggtatgtgtgcaccgtaatttaccccactgtactctcattgactgatatttagtttctttccaatgtcttgctctcgaatgattatccagtaaacatctttatccaaatatttttatgttcttatgctatttttttctttaggataggtcgttagaagtgggattactagatcaaagggtataagcaaataacattttttgtagattctgccaaattacttttcaaaaatgttgtcccaattaatgtccaccaacaatgcaataaagtgcctgctaatttatttttgctagtagaacggaccaaaaaaagttgtaatttgtgtttccttggccatttgtaaagttgagcatcttttgtgtgctgattgtccatttctatttcttcttttgtgattgccaatcattgtattttgggttgctcgtcttttccttttaattcataataattacatatatttggaatattattaggaatactaaccctcactctgttctatctgtataaaacttttttctctctgcttctcacctgtcagttgcactcacatggcaacaggcatttacccagaggtgcacgtgtgcacacagacctttatttgtttgttttaaatttttaagttcagggtacaggtgcaggtttcttacataggtaaacttgtgtcatgggagtttgttgtacagattatttcctcacccaggcattaagcctaggacccattggttatttttcctgatcttctccctcctcccaccctccaccctctgaaaggtcccagtgtgtgtcctcctctatgtgcccatgtgttctcatcatttagctcccacttataagtgagaacatttgggatttggttgtctgttcctgggttagtttgctaaggattatggcctccagctccatccatgttcctgcaaaggacatgatctcattctttttcatggctgcatagtattccagggtgtatatgtatcacgttttctttatccagtctatcatcgatgggcatttaggttgattctatgtctttactattgtgaatagtgctgcaatgaacatacatagcacacagacctttataaaggcagagtggcggtttgctgtgttagaagttgggaaaaggcataggcttggcctctggttttagcaagctggtttgccagcccccgcttctggcatgcttgggaggctgttttgggcaggattatttacccttcactgcctcattgttttcagcgggcccgaaagcattgaccatatccttattttcaaggatttttatgactatattttgccctggattctatccaggacatccctggctttcagaatcatttttcttttgtctttctctagactgaagtggaaaactatttagagttacccttgggcaggccctggggaatcagatactggccggaaggctgccagaggccaggggactcaggggctctggaatgtcctgctgttccctgtttcctgcccctcactgcctggcacgcatagcggagagctggaggggctcagaggacaggtgtttcctcccctgtatggcatgtgtctccttccaggacagggctctctcactttcctgtcacctggctcattgacgctaaccagggggagatacagtgagtcagtgatgagttactcgcaatacatatatagttttaattggcatgcgcttttcttcatttcaaagaaagaatgagaaatggatacatggtaacccttctggaacattttttttaattcaaatttaaagttgtaaaaatagtacaagaacatccatatattctttactcagatatacttattcacattttactccattagttttagtatatatgttttattatacttattattattatctcccttcctcccccccccccttttctttctctcgtctctcccttcttgtttctccctctttctcttactcctatttgaaggtaagtcatattcatcacggtctttgactcctaaatatttcagtgtatatttcttaagagtagggacacagttatcaacttcagtaaatttaacacgatgccatacttttttgtttgtttgtttgtttttgagacagggcctcactctgttgtccaggctggagtgcagtgctttgaacaaggctcactgtagccttgacttcctgggctcaatccatcctcctacctcagccttccaagtagctgggaccacaggcacaagccacctcgtctggctaatttaatatatatattttttttgtagagacagggtctcactatgttgtccaggctggtcttgaactcctaggatcaagggatcctcctgcctcagcctcctaaagtggtgggattacaggagggagctacagcacctggctgataccatacttttatctaatatattgtttgtattccagtcatgttaatggatgaaataatgtttttcatttcatagcaatttccctttccctctcccccagtgcgggattcagcctgtggtccatattgaatttagtcatgtttctatagcctcctttaatctggaacgtttccttagtctttgtctttcatgacaatttacagttttgaataatatagtatcccttttttctaatagaatgttcctcatttgggatgtcagcctaaataacgaacagagaaaaaagatatttgtgagggaatagagccagccgtgggaatatgcatgccatagtaaaccacatgagtatttaaggaggtaaagaaacacaaaggttttcagctgggtgcgctggctcacgcctgtaataccagcactttgggaggccaaggtgggtggatcatttgaggtcaggagttcaagaccagcctggccaacatggtgaaaccccgtcactactcaaaatacaaaaattagccaggcatgatggcatgcgcctgtagtcccagctacccgggaggctgaggcaggagaattgcttgaacccaggaggtggaggttgcagtgagctgagatcgtgccactgcactacagcctgggtgatagagtgatactctgtctcaaaaaaaaaaaaaaaaaaaaaaagaaagaaagaaacacaaaggttttttagaggaaaagaggaaaataatgaggattacataattattttgaaatattatccttggctataaaaatcaattacaagggtgattctggtccagggttggactggtaattagtgggcagatgttcttgcagaagtgttttttgagtaaggctgttatagcctttgtgcaagactgtgtttttgcagtcttttgtgagggtttttgttatcaggcatacaagcatgagaaccctctcttcatggccttccttagctctttttgttagggttttcttaacattagcgactccatttttattctgacaactttcgtggcagtttgtttgatgttttctcatgcttagattcaagcttggattaggttactcatccctggccagaacactgtctaagtgatgctgtgtctgtctccggatctggaggcacatgatgttccttactggggaacgttaatttcaatcacctggtcaaggtgttgtctgatttttccattgcatatttaaagttcttttctcccccttgaagtttgttaagatgtacttgaagatggtgcaaatatcctgcttctcaagaagatgtccccctaaacttagcatccatggatgatccttgcctgatccaatccttaccatgatgggtatgagctgattttcatctccagcactccttccacatgtaccaggctaggctgtgtgaggctcttgtggtcacagtggtgctggcataaccccagggccaccacgcattgatccctacctgtgcctagcactgtgccttggtgactcatgccttgagcctcaccccttggctcagggccattctctcagagttgaaagacctctgggtcattaggttgggtgtctcatctcttccatccttgatagacagtgttggagtgagacagacacccattctggggctggattattcattagaaagtccttccttctattggctacagtttttctccctgacattttgaggatcttatttctctaccctcaggaatgatcaaaaagaaatctaaccctcttgcatatgacagcacttcaagtcatggtctaatatggtgctgacagtcactgggtgggatgggaatgtgcagagaagcacaggaacatggtgagtggggaggggaagaagggaactgacacctaccaagttctatctaggttccaggcacatgtggggggtgataggtgtattaactgaaattttaccagaactctctgaagtattcattatttcctccaagctccaacaatgcagggtgggttgtccattttattctcatcagtatccccagtacctacaaccgtacctgacccatgagtggtgctcactacatatttgttgaatgaatgaatgaatgacttttacagatgaggaaacagtctcagaaagtttatgtcatgtgtgcccagccacgcagctggtcagattgcagggctaggtttctggcatggtaggatgacttgagggctcttattgttaaatcactgaatgattaatacttttggaagatagttgagagaaagaacattttcaaagtgttgctgtaggttgaaaggtacagtttgaaaacactgggttggtgagtgtgacatcctagggtcaaccacctgggctgttccatgaacccaatagaacaggagctatgtggcctgccagcctttctggatcactttcctttggggcatttgggagaaggtagcttgtctcctgtccacttctttttcagtctgagccgtacccactcctcccatcttcctgcagctaacatggctctcagcaccaggggccgtggtcctctaggctgccccagccctggttcctgcacacccacattcttcagcttaaaccgccactgacataggggaaggcccggagtcactggggcaggggctctgctaccctctgcaggcgtggaggcagggccctaaaagagggaggagaggtggaagagaagggttcactgtgggtgtggaggcatggagaccactctcattggtggctctcttctgggtcctcaggcatcctaccacagggttgcctctctctgacccacttgtttctctggggtctctgccagctaccgtgatgcagagctgcaccctcagtgcacccttctcttccacctcccctccctctttagggccctgccttcaaggccacctcctgaaaactccaaatgccatccctgcatagtgtagactattagacctcccagcctcctcttcatatgatactttaacccatctgaaaaatagaattaattagcttttaaaagctttttaaaatggccactcaaggctgggcgtggtggcttatgcctgtaatcccagcactttgggaggccaaggtgggtggaccccttgagcccaggagtttgagaccagtctgggcagcagagtgggaggccacgctgtgcagggccacacagggaagtgctggggtcagtgccagaatcagtgcaggggtcaatcaggaggcagagagagcgaggggaacacggggacaagcgcctttattgtggtttccaagggaaggaatgggcgaggcagggtaaacaggcctggggactggccagtttgaataatttctgtgggctctgggcacacttacacgtagacatatagctgtctatgtaccgacatagacggtaggggctgtcctgagttgctggaacctggccctatggtgcttaggacaggggaatgtgggccctgagtgtgacaggctgtggaggaggtgtggggtatgggctcagagtggctggtttgcatatgaaaggcctgctggtaagtgaggagtcctttaccatctccaggaattctgggaagagagtgcctccaaggtcaacaaggctccagatgtcgaagcatcagaaatacaaaaaacatagtttggcataagattaaaaaaatatgggccaggtcaaatgtatagactgggctccccttcccacggattaagcaaaccaatgacctttctgtttctttcatgatgcactcatgggcctctaagatggcacaggaggctcactgtagagttcaaagcaaagcctcaggctctgtcagccttgttatttgtgtgaaatcaggcaagtcaaacaccttcccaagtcccagtttccttgtctgtgaggtggactgaactaataacagtacctaccccacaggactagtgtcctaatatgtacctagttgatgtaactgccctacagattcatcgtgctggctgccaagatagagctgatttatcaagacaggggaattgcaacagaaaaagagtttaatactgagctggctaaatgggagactggagtgttattcttactcaaatcagcctcctcgaaaattcagaggctagagtttttaaagactgtttggtggtgatacggtttggctgtgtccccacccaaatctcatcttgagctgtagttctcataatccccatgtgctgtgggagggacccagtggtaggtaattgaatcatggggacagttatcttcacccggttctcgtgatctgaggttttataaagtggttcccacacttcactctgtacttcttgctgctgccatgtaaagaaggacatgtttgcttccccttcccccatgattgtaagtttcctgaggcctccccaaccctgctgaactgtgagtcaattaaacctctttcctttctgaattacccagtctcaggtatatcttcattagcagtgtgagaacagactaatacaggtgtgttcccagaccaaaccgagggtctggctgcttattctcatggcccaataatgagatgaagatgaactgggaaagaagagagtttatttctgtaatcaggtacaggcagaaggcctggaaaatatcagcagatcaactcgaaattacaaagttttccagagcttatataccttctaagctatatctctacatgtgagcgtgcattcttctaaagacctaagtgtctaacttctttgaatctataactaaaactaaggtctgagttttgaagaccttcttctggagcctcagtaaatttacttaatctaggtgggtctaggggccaggggtgattatccttcgcttgtctcctgctaaatcatggaggtttggggagatcctttagacccccaataaaacttgattgttgaggcctggggagtttcttcagacccccagtaaaaacttgtttagtcctaaatgggtcctgttaagaattcctttgttatcttgtcatgcttcaagtccccggaaaggcctgggcaaaactcttggtgggcttttgttacattccagcctttgtgtgatggcactggctctatcagctttgaatgtttaacttcaccactcagtcagtgctgaaacagctgttatgaagacctgcctgttcagctgttagcgagatctggcctgccacaggtgggcagggggctagggaataggagtgctgatttgttgggtcagggatggaatcacaggaagttgaggctgtcctctagccatgagtcaattcctgggtggggaccacatgaccagatgagccagtttaccagtctaggtagtgccagcaggaatgcagtgtctgaaaaatacctcaaacaccaatcttaggttctacaatagtgacgttatccataggagcaactggggaggctcggaatcccgtggcctctggctgcatgactcctgagtcataattcctaagcttgtggctaatctgagttttacaaagttactctggtctccaggcaaggacgaggtttgtttctggaaagggctgttttcatctttgtttcaaagttaaactataaactaaaattttctatggttagctggcctatgcccaggaatgaataagggcattttggagattaaaggcaagatggagtcggttgggtcagatctctttcactgtcatcattctctcatttttataatttttgcaaagccggtttcattaataggagggttgctattattagcatgcaagttccatgaggtcagagactgtattttgttggacatactaaataagtatttgttgaatgaataaattctaagatttttaaggagtttttacgttttgtttttaaatttaattttttacgttggtaaaaactttaagaagttgtaaaaacagaaactatatttaaaaacgcagtgaaaattctccctggcctctttgtccctgatctgcccagttcttgctgttccctaacaggtaacccctcttcttagtttcttatggatcattccagagatcttatattattgcttaatcgcccatatagattctaactttcctcttttttatgcagcaagtagcttattatacatgctcttttgcaccttgttttatcacttaacagtgtatcttgaagattttccatgtaagtgaataattccccattattgttatagctgtctagtgttccattgtatgaatgtactgtactttatttacctgtcgtctatgatggacacgtgaattgcctcctgtgttttgttttgttcttacaatgatgtaataagacccaatgttttaaaataaaattgttttgatttctttgtgctttattaaaataaattgacttggccaccatgattcccaccctcccacatgctgcctaaggctaaggtttgggggccacccatgcctccttcccttctgccatacggcagtagtagcacccctggatggtgagtttgggaactagttctttttctacggaggaaaagcatgtgccctgtcagacctcaagctgccttggcctctccttcccttgcccatgccagttcctgccttctctttctttgggttggcagcggctctttcggtccccacacttctccaccccccacattccaatggctccagagcacagctagccaagaggtctgaggaggctgggagcacctgtggtgttttcctccatgtgggctgcagggggtgtggccaggacccacgggtgtcatttccacccatgtaggctctgctctgcacacactcatagctggccctgtgcaggacccctggccccctccttgcctcatctgagcctctggaatcctgtctgccacttgccaggcccctggttggtgccgactgagagtgcagcatccctgatgagcagagggcacctggccctggagcctgtgcttcagtctgactccagatggggcgggtctcctcaagggccccagacctagaggcccctggataaagccacatctcctccatccctgtgaaatgaatggatgaatgatgagtggccttctgggttttctgtgaccaacctcagacccctctagcctcccaggggtccctcttctgcgccccccacctctcctccctgagcaatgcttcctgggaggctctgaatttctgactcttgtgaacttgactaccacagcctgctccttacactgcgggagaggcagcctgccctgctatttccagcccttccttctacaggagtgggggctggtgaagccacccttcttggagggacttgcccccaggccgatagcagggtttgggggtgcatttcatggccccaaaaagcatttcagggaggaaataacaagcagtcaaccctggctgctgtctcttgggcatccaagaggcaccccaggctggcaggggtgggggtgctacttccttctgcatttcctgccattgttccctgacccacttccgggaattctccctgggctgggagggctggacaaccagcaagggaggcagaggaggtctggcttttctcggcaccctatgacctggctgctaactctgctctgctcagtcctgagggctcctaagctggagctccagctgccatgtacagctctctggtccatgaggcctccttgggccctgcctcccagtccccaaggagagaagcctcagtgctctgggggattgacagggaacctagatacccgggtcctggggctgactcagccattctcctgcttgaacaagtcactcccctctgccaccccagttttctcgtgatgggcagggttactctgatctctgatgtcgcatggactcatgcatcctctatacctactgtctggtctttttgacattgtctgggtcctgaggacaattcagtcaacatactgacgggtgccttctggcaccagcccctaggatggagacactccaggagccccagcttattaagtgatggtaaaaatcctgctccatgctgtgaaggaatggaacacaaatcagtttacattctagaaaatatggctcctaacactgtgagggggtttcaaaccctggattgaatattagtgaatatctctccccctctatccccttctttcagaaagggttagaaaatggaccttgagcgtatattacatttactgccttgctagcaagggcacgagcaaggcggcagagtctgttgctttcaagaaggatggaaaaagagggatttcattgttgagaagcttaaataagtggctagtttttaattttaagttttattatgataaatcgacataaacgctaccattttaaccatttgtgagcatacatttcagtggcgttacatgcattcatgatgtcatgcagtcattcccaccgtccacctccaaaatgttctcatcttctaaaactgaaactctgtaactgttcaataataaatcctcacttcctcctccccccagcttgtatcagccaccattctactttctatgaatttgactactctagctacctcatacaatatttgtctttttgtgactggctgatttcactttgcggaatgtctccaaggtccatccatgttgtagcatgtgtctgaatcttcttttttgagactgaataatattccattgtatggatggaccacatcttgtttgtgcctctgttgatggagacttggtttgcttacacctcttggctattgtgaataatactgctgtgaacacaggtgtgcaaatatctaggtccctgatttcaatttttttgggggtatataactagaagtggaattgctagatcatatgctaattctaggtttaattttttgagtaactgctatgctgtttcccacagtggctgcaccgtttacgtccctacacaccatgcacaagcattccagtttctccatatcctggccaacacttgtgatttttctctccatgactctgtgtgtgtgtgtgtgtgtgtgtgtgtgtgtgtgtgtgtgtgtttataatagccatcctaatggatgtgaagtagtatctcagtgtgagtagtcagttttaaaaatcacctcgttaggtcgaggttgcagttttatttgatagggtcataaaaatctatattccaatcaatatttgcagagaccagaaaagggatgagcccagatgacaggtgtgctgttcatccatcaggaaaaagcagttaataagtacacctgtggctgttcaccagcctaacatggccttgtgccctgacagtaatgttcagggtaagtccatttctcagggaggcaagcagaagtcacacacagacaccaggcgacaggttcctacagtcacaggccactcactgcccatggtttcctgctgcctctacagaggggcagactatatggtgagcccacttcatagcttcctctgctctctttgaagggagcatgtgccaaccatcgcgctgctgacctactctttcctaatagcccatacatgtgccccacccctcctgtcagtcagaaatgcagcctctggtgcgtgtggtatggaccgcccagggcctctcaggagtggagcctgtttcccctgccccaatatccttttctccctgtccctgaagacaggaaggtttccttgcttttcatgtacaatcaatcactgccggcggagccctgggattccaatacagacggcctgtgtagacatgggtcatatgatctgctggggctcaggggcagtgtgggggtgatgagatactgacctggtggactgtcaagggctcatgggaagacaacccttcatctctggggaggcgtggctgggcctctggggaggggcaggaaggggtcaaggtggaccttggagaaggaaaggtatctcttatcccttcccatgcccaagtatttccctaggggccaggccttccagggatggtgcatggtggtgactgggtgtgggggtgcaggagagccctcgtggggtgctgggtgactgtgtggtctaggcagaccagcctcatctgagtggtggcagtgaggggtctggcagaagagccagggtgccttaggctagttttctacatttgacttctctctcctctcaggttcctgggggaagccaaggtcccactccgagaggtcctcgccacccctagtctgtccgccagcttcaatgcccccctgctggacaccaagaagcagcccacaggggtaagtgcccatcagcctctgccaggttaaggtccaaggcattgccaggtggcttcctctttgggccttgccattctgaccccagacatgcatctgacttcagctcccttgaagcaggcctggccctccctgaccagagtttgcagtgtctggaggggcactggactaggggagatgggaagggcagagggagccctgaccccacctgcagggctcaagtcagccttggctcgcagcagcttggcctgccccttggtctggtgctgccggtctggccacctcctgtccccagcttcctggtcagccttggctatagcccacctagtctccctggcagacctcccctcctccctcaccatccagccctcttctccagattcagaatctctgaaccatctgggtcacagggcatgagggatggagggaaagagccctctcccctgcccaccaggaccctcttccttttcctccgttgttcttcctgcccctccctggccttctcagtgctccccccaagtccaatcagacaattcccagccctcctctctgcctgttatttttagtgagctaaatataccctgtagggttctctcttcttggtagaattcctgacctctcctgtgggttagccccgccttccaggatgtaccaggaaccatggattggaactacttccgccctgtgaggcctgggggattcaggccctgacttgtctcagacagggcagtggtactgccccgtggcgggtgtgtgaggccggggctcctggctggctgggtgagtcaggaagtagccggtctgggcagatctctgaatggaacgagactggatgctgagacctagagaaaaggaaccactgaagtcacatagtcagtggctgttcccatgggggcctggaccaggagctcatcccctagaccctctggtggaatggctgtggatggactcctggttcactgaactctcagtctgctgccctctcggtgctggactttgctcccaaggggtcttaggctggggatggctgggctgctcccttgatggaagatgtcacttcccaggaaagtccatctgtttcccacacagggctcactggcagaatgttctggtttagagcagtattcactgagcctgtctccatcaccctgagtcccctctcatcctccgtttcagcctcctgtctcttaacactccctgtggtcaaggaggaccccaaggagttctggaactaccccttcaggggtcctgaggaggctcagacccaaccctcaaggcatgggacacagatggagggatgataggtatcaaggcagctggcgagagaaagccttggggtcaggcttggttctcacttccttgctgggacaccagcatctctccactccagctctgtgtgcatccatgactctggtgtttcctgcccttcggtcccttccaacctcaaaggcctgtccagccccgaggcagagttttccatagctggtccctattcatgagccgtgtcaggctggagccatcccctccatacctcccttcgcctcctcctgctccttgttcccacactgtctgggcttcatgtttaccagcggggagcctgctgccttctcttccctggctggggattcctggctgtctgcagagctttacaatccttcaccaaccgtgtctccaaaaagagtgtgtgagatccaggaggtggcggatgggagagagtgctggaccctgctgggttgagccccactagctgagcacaggctggaaatggagttggggagcctcctccctgttgcccaggaggcagtcctcacctgtacagagggtctaggactagattctagtccatgtgatggcattaaggtcacagtgcagccccagacaggtcatatgtccctttgggctggggcttcctgcctgggacctgggctggctgcactgtagtgcgaggcagggataactgggggtgtgctgggcagggacagacagccaacaacattgagggttctcgctggccgctcactgagacctcatttctgagctaagcccaatcagcagagcatgccaggtgcccccatttcattgtagctctcagttgcctctaagggccaaagaacctgctgatggggtgatacgagtgaacacagagccagtgggatccttaggaaactctggcagactgagaggcgtgggggaggccgggagtcctgccgcaggctgactgcagaccccgtttgccttttgctcagtgttctcacccaagtcccttcagatatagcacgctgggctgtgtgccatggaggatctggctatgtgccaaatctaccctctgacagctgctaggttgatggggaaaacactcccccagtcctggaggaacctccaggccatggggatttaggacacacatggaggaaaagaagcagcatcctctcagatgtattttaagaggagctcactcaggaaggtgtggatacatggagaaaactcagtcggcatcacccgggccttaaagccagaatcggatcacaaaggaggacaagagcctacgaagcccagtggtgtgtgggtcagggaagccaggagggcactgtgtgttgggagcggggacctgaggcgggcaggacagtgctcagtgagtccctgagctttcttcaaaggtttggagcttctgccaaccaaccctgtatcagctcagggccacagctaccctctgcctgcttctggaggttgtctgagggagaggttagtgagggccacgcacatatcaggcctgtcttgtccacacgggacacatgtgttaggggaggtgagagtgggctggtctgggttttggttttgatgagctcagtgttggagagctgtggtcgaggaagtaggtggcgcacaatgggctgggcatggcagggtgggcgaaggaccccagagcctgaccacataacctggaggagggtcacagccagggagggtctgaggaggtcattcgccttcagtttcctgagccctcttagcctggggcaagacaggagtctcaagttctgctgatctcgttgattgtgggccccaaggcagcagacgagggcgaccgaggttaccctgctccagggcagcgtgtttggtggacacacgattgactgacaatggccttgtgcgtggagaaccctggagtgctgctgagttggagactgaggacctgggctgtcaggcgcgggacccgtgacgtggaggaccttgaggaaggtcccactgggagctctaggcccaggttgtgtagtccgggagagcacagggctcacatatatcccccaggaagaaaatcttagctctatttgtctagagaaggagacaggggttgagctgtgatgtcatggtgagggtacaaggtcctggtcctgggtggggcccactgacacgcccactttcccttaagagcctcagcagagccaaagaacttcagtattcaccatcagatcctgaagccatggtccctggggcccacctcctagtgctgaggtctgttctagaccctgagctccagagcctctggagctgcagggatgtccctgtggctctctgatgggcagctagaagacagacctgtgctggaagtctcattcaagggcccagagcaacccggatggtgccagttcttcaggaggttggtgtggagctgtcggtgtagaaacaccggatgctcaggaaaccccagaaggggctgcctaagtggtctctggagccctctctctggagagggctgctcctgtctgcatcccggagagggctgctcccaagccccagtgctgaggagctggcactgggcacggtgtggaagagttacactccggcggctccacctctcacagagatggtgtatagaagcccccaggtggtgtgcagtgagtggatagcagggtgagcccctagaaacaggaaggggcgctcttccaggggacctgtttccaaggtcagaggcccaagggcagcccaggtgtggccccttcaagtttttgcttcactctcctcagctcaatggggtccactcagaccgcttgatttaacactgcaatctgcaaaatgtctcattcccctgatccttcttgctctggtttactttttcttttctttctaacatactctcttctttatgtatttattttgtttattatttattgtctgtcttctctgccaagacatcagctccatgggggcagggacctttgccttatttatggaagcgtccccagaatcttgaacagtgtgtttggccctggcaggtgcccaacacacaggcacgtgtgcgcgcacacacacacacgtagagggaatgaatatgtgagttaatgaatgaatgggtcaggccagacatgtcaggcagggccctcagtgttcatctttcagatgtgggcccaactcaggccaagtcaaacaaacaccccccacaggcctggcctctggggccactgcacggagccctgcgctcacaagggcctcatgcttggcttaattctcttctgtttccatcttgaaattcttaaagctcactgcatccttgacctccggggctcaagtaggctcaagtgatcctctcgcctcagcctcctgaatagctgggactacaagcatggctaccacgcccaactagtttttgattttggaataaggggctctgcattttcatttgtgctgggcttgcacattatgcagctggtcctgacctcatgctaatcttggagggccggagtcagcatggatgggcagggggctttatttgtctctgcctaaggagattcctgtggctattcctaaaaagaagcagattttcaaaaccttttatttggaaatatttaagatctagacaaaagttgccaagtatggtacaaagagtattttgtcctaagccatttgacatgagggtgccaacctcctggcccatcattctgaactcgagtgtgtgttctccagttaaggactttctcctacataaccacaacacagccttccaaacgatgaaattaacatggacacagcactctcgtctaatccccagaccccagtcgcggctcatccatttttcccagtgtcctttgtagcagaaggatcccactaaggctcatgtgttgcacctagttgttttgtttcttcagtttccttccatttggaataattcctcagtctttctttgacttttataaccttgtagctggatatttttttgaaattccggccaattatttgtagaatgtcccccacattggttttgtctgatgtttcctgtgtttagatttaggctgtgtgtcttgggtgtgagtgtaacactgatgctgcgtggctgtctttgtgccctatcaggtgggatgattgtgattcgtttggttaccacactgttaactgtgatcatttgattacactagcatttgctgggtgtccccgctaatcgttcatctactcccctttctcatgtcagaattttgtgactttgtaatatcctctttgtcatctaacctttacccgtgagttctatgagctgttgttttgtatttgtatttttactttttttgagacggtatgtcactctgctgcccaggctggagtgcagtggcacgatcctggctcactgcagcctccgcctcccgggttcaaccaatcctcccacctcagcctcccaagtagctgggattacaggggcatgccaccacacctggctattttttttgtatttttatagagatggggggttttaccatgttggccaggctggtcttgaacccctgacctcaggtgattcacccacctcggcctcccaaagtgctgggattacaggcgtgagccactgtgcccagccgtcatgaagtgtttttgtttttgttttgagactggtctcattctgttgcccagctggaatgcagtggtgtaatcatggctcactgcagccttgacctcccaggctcaagtgattctcccacctcagcctcctgagtagctggaactataagcgtgggccaccatgcctggctaattttttgttttttgtaaagatgagggtctcactatgttgtccaggctggttttgaactctgggctcaagaaatcctcctgtctcagcctcccaaagtgctgggattatagttgtgagccactgtacctggccgtacccaggagttttaatatcactgctgtttcttggttgaattcattattgctttgatgattgctaaatagtgatattctcagttatttttcctgcattagtcagttggcatttcgtggtcaggaaaagctttctcctctcctatttatttactgtggtatggatttgggtatttctattttattcaattgtttaatctgttactgttattatgtattttcatgtttctattgtctcagatttggcctgtgggagctcttgaaagttggcttctgtgtccttttgacatgtttttactttttattatttatttattattttattttatgtttttgaggcagagtcttgctctgtaacccaggctggagtgcagtggtgtgatcgactcattgcgacctctgccgccaaggttcaagcgattctcctgcctcagcctcctgagtagcagggattacaggtgcatgccaccacgcctggctaatatgtttgtatttttagtagagatggggtttcaccatgttggccaggctggtctcaaactcctgacctcaagagatccgcctggctcggcctcccaaagggattacaggcatgaaccacctcgcccaggctcttttgatgtgtttttaagaatcagtcattcattgagcatttccttcctttctggtgcaagaagatggtccaggctcatcttgtatcttccctgccctagccctggaagtagttatttctccaaagagcccaacttaccttttgctgaagtggaagaaagtcccaggacagttgttaaaagtgcaaatacccaggcccaccctagacctactgaactggcatctctaggagtcaggtgtggcatctgggcggaggggaggactttcttcttttcccctccacgggttgcaggagctgaagggactggctgctcacgtggcgacacctggtggtgattcaggaacccacagggcaggttatgttcattccttgggtgagggaattcaagggtctcagttgcctttgttgacctcctcctgggtctcctgggatgctgagctagctcttgtctccttcctcagtgttctgagccctgctttccaccagtgctgctctccttagtgtggctgtccccaggccccagtctggagagttcaagctcaagagctgagtatgtcgggagccttcaggcccttctctcttgggactgagtttgctctgtgagtccctggacgtccctaacatcattcagcagaaaggtccagtgaactgtgccagagccactcagagggacattatgcctcaggaaaaattgtgtttataaagggtttgtcaaaacctggggagagcttattgcctgacattcagtaaaagaaaatcattttgcatacagcagatctgtctactatttgtttgaaagattggagagaactggaatgtggagtcacggaattatggacaattggttttcttttgccttatttttcctctttaagctttctgtgcttcccaaactttcttagagtatccgttgcactaatttgagagactggctgccccaggaggcttgctggacctgtggagccgggacagggctcaggcaggcccgggagcagccaggctgcagatcctgctgaggttgtgccgttcccaggttcagggtgagggttggggtggggtgggcgcatgggcaacccgacctcgcctgtgagggatgtcaccagtccctctcctctctggccggtgcaagccggggcagctgaggatgtgctggggggcaggaaggaagagggctctgcaagcctggcagcacactgagaccctctcagtgctagctgcagcctgagcaaagcagagcaaagctgagttgtccctggagaagtaggggcaagccattgactgagcagagtggccaaagggacattttcctgaagacaggccaagtggatagtgggaaaaatcctgcaggtgaggttggatccctgattcatttgcagaagtccactacgtgctacatcaactaatttgctccacatttgacctgtgaggaaggtgctattgctatgactaaccccaattttatagatgaggaaactgaggcacagggcggtcacagatcttgcctaaggtcacacagctcctgagtggtggaacctgaccccggattctgtgcttcgaaccacctgactatgctgataggtcccttggggtggctttgccacagcctcctgcaaacctggctcttgtcagagccatattccttggtggagggatgccagaaacagggaagatactggagggcagtggtccgaggccagcgcaccaacctgtcccccacgtctcatctcttccaggcctcgctggtcctgcaggtgtcctacacaccgctgcctggagctgtgcccctgttcccgccccctactcctctggagccctccccgactctgcctgacctggatgtagtggcaggtgggtagcccacgttggcctggctgggccccagcaagaaggccggcagtggcacttgagcctgggggctgggagctgcagcgaggcttcccagcctttgctgccctccccaggttggaggctgcccaggcctggaaagaagagggtgcagtgggtgggaagtcctgagggctgccttctgctgtgcagaaagaaggggcagcaggcacgttcccttgggcggtgcagggagtaatgtgagggtgcctccaagccccagctgcctggggacggggctgagcccaggctgggtgttctgagctgtgcagttccaagaagggtgtgtggggatggggtctgacccaggtgatacctgaggccccacaaactccccagaaccgaatgtttccctacctcagcacccagcaggcctttggtgatggtgtgtgacaaaagaactagttttttttcttgaaagagccctgaactgaacttcagggttccagtcctgcctttgacactgagtctctgtgtgactttgggctgattactttccctctctgggcccatagattatttgtgaagggagcagactaagttagctaagtgctgtgcctgtctcagctctcttcacttggttctgccaggctggtcaagcgaggacccagcccggggtggctggctctccactggtgggcctgggtgtgggagcctccatgtggtccagcctgctggggttgggaggaagctacatagacgggctagtgggcacttgcccatgggaaagattctagagtttttctcttagtgaagggagctagaagcaagcacagcattaaaaccggagcagcccatgtctcaattgagtgtgccctgtgcctgacctggggccagcccagcacagggctctgtggtgaggtcggcagagcagagctgtcttgttggggctcagcactgtccgagcttagagatgggagatcagtctggactggagtaacctggtaatcctgagctgtgtggctggagtgggctcaggggaggaaggagaggtgcccgtggtggcagagggtggggagcagggagggtccgaatactctgggactgtgttgaggtggatctgacagagttaggtgcaggccaatcagtggaggcttccagacacgcctgggaggtggtgagaaggaacaggtgccactgggctccacagctatttctgagctttgcaccaggctggggtgggcggggaaggcagggttggggatggaggtgcagtaggttggtttccttcaccccaacctcctccctcccctcccggggttatgccctgcccacaagacaggcgggggacagagccgggccgagacttggtccctgctcagtgacagcaccatggacacgagatactctggaaagaagtggccggcccccacgggtgagacacgggccaggactgtcctgatcccagaccctccctgtaactgtctcactagctgccatggtcagcttgctggagcggggccaggtggcagaggactcctcctgcaggacttggcgggtgggagggctagggccattctgttttcttcctgttgactaactggactgactgccctcaagtttcagctgctggaagctcctcttctttctaccttatccatcctggctcactgatggggagggaggagggagaggaagaggggatgagtcttagggcccatgccttttggatcttctgccccctgggctgggtcccaggggcaggggcaggggcagggccagagggatccaggcctcattagggccctctcctcttagacacaggaggagaggaagacacagaggaccagggactcactggagatgaggcggagccattcctggatcaaagcggaggcccgggggctcccaccaccccaaggaaactaccttcacgtcctccgccccactaccccgggatcaaaagaaagcgaagtgcgcctacatctagaaagctgctgtcagacaaaccgcaggatttccaggtgatgaacgggctttctctgaccccaggctcctcttcagccatcagctgcgggtgccaggcacctgcctggtttgtccagcttcaggggaagatgtgtgtgggatcctcagggccctcctgtgggggaatctgtagtttccctgggcctgggcagatgccaaacagggagttcacatcttacatccacagaataagcttctgccgagacctgtggttttgcgcttaaaaaaaaaaaaaaaaaaaaagtcactgcagagattcagcatgtctttgcatctctgatcagagaaaaacctgatttttctaaccagggtatatccaaccagcaagctcctggctattcaggtgtggtctgtgtccagcaccttccgcatcacctgtatacttgttagacatgcagagtctactcagacctgctctaccagaatctgcattttaacaagatccttacctcaaagaagctctgtctaacatcttttttttctccttatatctatccccctgcatatagccatggatttttctgagagtcatgtggaatttgaatttgttcaagctcatcacagaataaaagctattaatatgaacactttgacacatttttatccaaaaatccatcccattttatttgcttttaactttggtcctttgcctattttttttttcttttcaaaagaattttctattttgatgtagtcacacagtgatatttaactctttacaactacttttaaggttaaaagcaagaatcttaaatctctatttataatactaagtgcaacaaattgcaaaaatatatttctattctaaatcatggtaatttaagcagaagtcctagctctaaccactgtttgccccaaaagacaaaattctagcccccatactactattccccaaacatgttcatattgcctttgttctctttatggaaataccatatgtttattttagacactttggaaaatatattaaaatgaggagattaaaaatcactcatccatcttcccattgctattaagaatatatcctcccatattatgcaatttacaaaaaaaaaaacagttggtcagtaaataacagttgattctaaagtggagccagtaaatatcttatttttttccatagaattgccttaatattgtaaaatttcatattttaaaatatcttacctaatatttggaagcatagacgttcttgaagtcttcatttacttacagctcaatggcaaaaattcttaatttatttctcagaatgtaagaaagcattgcatcttataaagaataaagactatttctggggtcacttcactgtgtaagttcgacctctgagggaattgtcaataaagaatattcaagccacttaaaaatgccagtatcaatggggtctcgggtggggcttgtgccaatggctgaatgacataaatgggggctgtatctgcccacccctggggtttaatgtgggtagccgacgaggggcagcctggcagctcttctatggagctgtggaattttatagatgtaaggggccttggtgggaaaatatgatagttcgtataatgctcttcctaattcctttttaatactttccccaagaagccagtggtgagatggtccctgagatttctgactcttggggtggatggtgggtggtccttaactcttcccccttcctcctgctctttcctccttctggctttcagatcagggtccaggtgatcgaggggcgccagctgccgggggtgaacatcaagcctgtggtcaaggttaccgctgcagggcagaccaagcggacgcggatccacaagggaaacagcccactcttcaatgaggtgggagacatggggcatgagggccagaaccttggtgggccttccaatctggaagcccagtgcagacacctggcaattcattcaagagtgtttacgtatggcgctgaccttgggtggtgagatgtgctggctcccaaggaggttatctgtgggactggagaaagggctcctgctcttacttctcctgctgctccacatccctgtcaccctatagggccagccacccacccaaccctgaaatgaccacgtctgtgaggccaggggcagatcaccccagaacttgtccaatccccagaactgtgcccaatccacattttctgaggggactaaactgctaggcgtggaggcttgggggtggtggtcctccctctccctggcctgagggatcagcaggcactgatatgtctctctttgctctgaaccaacagactcttttcttcaacttgtttgactctcctggggagctgtttgatgagcccatctttatcacggtatgtctcagcagtcaaagtgttctccgtgggctgtatgtatgcacataggtgtcagtgcacacgcgtgtgtgtttgtgcacgtgtgtgcatgtgcacgtcagtgtgaatgcgtgaatgcgtgtgtgtgcctgtcggtgtgtatgtgagtatgtgcgtgagagggagacgtgttaaagcctgacatatggatgatgtggagtaactcacagtcaggctctacgggtcacagaaatgcctgcaacagctcagctggcaggcagcagctgcgggagagcccactgctcagcatccccctggggcctcaggtcagggtccttaaatcacttgtggcaatgaacatttaaggttccatcttattttgttaatccacgtgcctgcttctgactgagattctctttctctctgggccttggctcttcccccatctcctctgaagcgcactgcagcctagtggctctaagtgtaggctccggcactagagtggattccagctctgtctatgccgtgtagggattgtgttttctgtacaagtctctgtgcccctatttcacctgtgaaatggggataatgacagtatctgctgatggggttcctgtgagggctaaacactgcttagaacagtctctggaattgagtaagtgtgaagtgttggcagttattgtttgggagggaagagctattgggttggccgtgtgggccacatgttccctgtgaatgtgagtttccatgatctttctctgcaggtggtagactctcgttctctcaggacagatgctctcctcggggagttccgggtaattgcttattttctatgaaagcagtcagttctcacttctccgtgttggtggagcctctgtggaccatgggcaggggctccagagatcctgtgtttctctgctttgggaaaatataatttcaaagaacaacgccaagccctctgcacagcatctcctttcaccccagaaaacctctccacaaaggtagaagagaaagaaagcactttttgtcactgaagaggccttaaaccagagtgagatgtacatcacaggcaatgatccactaagatgctgcaaagacagaaagaaatctcacgctaatttagccagcgggtccaacccattgcccaccacatacgttctcaagagaagctatgccccaccctcaggtcaggggactttacatttcagacctcctgagaatgacatttgtatactaaagctgacaaatggcttatttagtttcttaaaaagatgtatagcacctttggtcacaccgagttcatcccaaagtcacctggtaatcggggtgaccatctatgttagctaatttgttgtgtccagaagaccaaacaaaaatcaaactcatatttttatgacaggaagtagttttacaacttggagcaaggtgcgcacgggagttaggctcctatcttccgacagaagctgggacacaggggagccgtctcccttggtgtttatatttcagacgtcctgagaatgatatttgtatactaaagctgacaaaaggcttatttagtttcttaaaaagatgcatttcaaagagacagggaaagtgtaatatatttacaagttttctaaggtaagtgttctgacaaaaagagaggggagggaagtacttcttcccttatttccaacaagcagaatcaagacccttatttgtaatttggattttcccccacctctgggaaggccgtgtgagatctgagtttgggcagccctcctcctcatcctggccatcttgggccagtgagacccagcgctctctgccctgacatcactctcaccctgggatgggagtggggttcagatatggatccctgggggagggagaggcagtggagagaggggaaccctgccccagcctcctcacttgtcccagacagtccagaagtgaatagtcctcttctgagaaccgagagccaatggatttaacagattacgtaaagtaaaggtaactagtaattgcacagactaaaggagacctgtatgatttttttttttttttttttgagatggagtcttgctctgtcgcccaggctggagtgcagtggtgtgatctcagctcactgcaacctctgcttcccagattcaagtgattctcctgcctcagcctccccagtagctgggattagaggcgtgtgctaccacgcctggcagtttttttttttttttggtatttttagtacagatggggtttcaccatcttggtcagtctggtcttgaactcctgaccttgtgatctggctaccttggcctcccaaagtgttgggattacaggcatgagccaccgtgcctggcctgcatggtgttttaatgtaatttgatgtaattgttactaattttctcattttgaaattttcaaggatttctcaaaaggaaagaaagagcacaagcttattttcccctctcccctctatccaagtatatcatgccttccttctttaaatttgtattttaaatatgaatttaaaataaggggcttggttctgcctgttgtcagaagttaccttagaattatttattctgcccaataaataattgctgggaccaggcgcagtggctcatgcctgtgatcccagtgctttgggaggccaaggtgggcagatcacttgaagtcagtagttcaagaccagtctggccaacatggtaaaaccccgcctctactaaaaatacaaaaattagctgggcatggtggtatgcgcctgtaatcccagctactcaggaggccgaggcaggagaatcgcttgaacctgggtggcagaggttgcagtgagccaagatcgcaccattgcactccagcctggatgacagagcgacactccatctcaaaaaaaaaaaaaaaaaaaaaaaaaaaaaattactgggttggacctgatggctagatcagtgggtgagatttctttgtctttgcgctgtcttctcaaatcattgcctgtgggaagaagtcacaagataaaaaactaagtctgtttacctggagaagcattttttaaaagaatgagcttgagcccaagtcattctgtaacaaattaaatcttaattatgttttgagtcttgttctgagaacccaagggttaagtcaaaaaattattttacttgtatctaattataaaagtaatctatgatttaaaaaaaagacgactttttaaaacagactgttgtaggttcacagcaaaaattaagtggaatgtacacagttcccatatactccctgccccctgcccctgctgccccctgcagccttccccactatcatcatcccaatcatctgtggatttttaatagaaaattgtaaaacacaggaaggaataaaaaatgaaataaaaataatccaaatctaccatgcagggataacatagtcctattgtgttgaatttcctttcctcttttttttttgagacggatttttgctcttgttgccaaggctggattgcaatggcatgatctcggctcactgcaacctccaactcctgggttcaagtgattctcttgcctcagcttcccaagtagctggaattacaggcatgcaccaccacacccggctagtttttttttttttttttttttttgtatttttaatagagatggagtttcaccatgttggtcaggctggtctcgaactcctgacttcaagtgatccacctgccttggcctcccaaagtgctgggattacaggcatgagccaccacgcccagcctcctttcctctttcttttctgtacataagcattctttatcaaactgggatcaaaatatatttcattttcttttcatgtagtatcaaatgttgactgcctgtgtttccaaatgttcttcaaaaacatggtttttaatggaatcatataatgcaccacactttatttaacgctttggcggcaagagtttgatttgtgtctcctctcattgattgcagatggacgtgggcaccatttacagagagccccgtgagttctcaccactttggccgtatccttgcattttggttctggaggctgattggggacactcatttggggtcctcactgtccctcctgggggttttagaatctagaggaagggtttgatcttgggagagaaagcaggtcattcatcctccatgtgagacaggccctcgggagggtgtaacactcacctgtgtctccgttggcccattcagggaggctagatctgaaaggccccattactggacactgggctcacggcagacagggacaggtcatttgggtgacaagccaggatttctcctcaccctggtttccattctgatctggtcacttcctgaaggggaggaaaatgccttgggtttggctctgccagcctcttacaggcgtttctgttaatatttctgactctgaccacatgaacactcaaagtaccttttgattctagaatctgagtcctgagctcatggcccagcggatgagtcctttacctcccctgtgcagtccatcctgggttcccggatgtggccacagcctggggtcttctgattctgggatcaccagaggatgttgtctctcttagggcacgcctatctcaggaagtggctgctgctctcagaccctgatgacttctctgctggggccagaggctacctgaaaacaagcctttgtgtgctggggcctggggacgaagcgcctgtgagtacatttccctgggtcttccttacggtcccccacgcggcacttggttgcggaggcaccaaaccacaaacaaaaactctatttttttttctgatttaaactaatatgtggtaattaatgagaaatgtggaacatgtagaaaggtgttaataaaaaatgaatgctctgggtgcaaggtattaataaaaaatgaatcactcataatcctaccactccgagagagctattattgtctcattgcacatccctctggaaggatatatgcacatattttctttttgcaacagtgagattattctatatatattatattgtgacttgaatttcatggcctaagaatgtatcatgctcatctccacatgtcagtaagtaaagttataagttggaggtggtaagaatgagaaaaatgttgagagcaggagaggtatctgcatctttctatgtttgagaagaggagaaaaggtttggaatcatctttgtgggagaggagtgaggggttagatttaatgaaaggatttctgtacaaacaccagagcacccactctgggttggacgctttgtttgtagtggagccacttgcctcatggtgctcagcagcgcagaagcagaagagaggcaggtgggtggtggacgtgttgggtgagggcaagccaggagtgctgaaggtcaggggtgaggtgaaggtcaggggtgaggtacctgaatatggctgatggctttgtgcagggagggagaggaggacagggcccctggggtctcctgccatgcctcgtgtctcccccatcctcaccacacactggctccttggccacctggacgtgctgcttggatgaatgtgggtttctacttctccacttagctgggccccgggtgctgtccgcctcttcctttacctgggtatagtttactccttatctaattctcctcatctccttactccttatctctcctggctgttcccagactttcttccctttcctaagctccaacctcagcttcccttggagaggcagagctgcacagcgatgagtggtgagagctctgggagctcctgtggtcctcaacttgccccccatcttcatccaccttccctcccttcctccgcccctcccgctgcattatcccaccacctccttggccatgacttcacatcctccactgtcttctttagcctcctctttctggtctcttctcacacttgtctcctctgcctccttctccatgatctgtaccaggctcaagatttccccatcctaaaacaccccttccttgacccatttctccccacccctcctctccactactattttctctctctcctactgctggtcatcaccaacttttgaaagggtgcactgcatccccctttttccactccattgccagctgctcattccttctcctcttcagtaggaatcccaccacctcccctccctgaagccactggtgtaagggtcactcattaccatagcttaggagctctcctctgttgttagactgcaccactgctccatagcgttcgattctggagcccacgccttatttgaaactgtctcctcccttagtattcatgactctccttgctccttttccagtgggttcttcaaattcgatgttgcagttcagtccctgttcccttgctgtgtcctgcccgtcactgttgaggagtccgtctctttcagacaccacctgagacttgtaaattgctcttctccagcctggatcttctgagctctggacgctcagtttcagttgccttgtcatcaggccacattaacatgtcccttaggcccctctaacttattatagtaaatctaacttattatagcaaagcctgtatcatttgctgcccactccccacacctgttccccatcccgtattaggtgacatcttaggaaattgcatgattatccacttagtcccccaaaccagaggccagagtttcattctttacccctcaatccccatgcaagcagttggccagtcttgttggtggaaaacctcagtgtacgcctcttctttttcccatcccaagacaggagtttgaggtccagctcccactctctctcacttgggtctctttgtgaattacaatataggttcagctggtgtaacaaagatgccccaaataataggcattaaggaggacagaggtttatttctctctcatgaatgccacagtccagaattggcacagtgcttcggcaatgatcagagacccaggctcctggtcttttctccactgtgatcatcatgcagcctccgtcacatggcccaagatggttgctccagttcccatcaccatgtctgtattccagccagggaaatgggagtaaaggacaatggaggccacatctcttccttcaaaggcatgatccagaagttgtacacatttatgcttaggtcccattgacaagaacttagtcacatggccacatctaactacgagggagcctgggaaataaagtccatcctaatgctgtccagctaaaaattgagggtttgttaggggaggcagaaaagactggatttgggggaacaactagcagtctctgccatccatcctaagtgtcctctgaggtctcctaacttcttacgttatacttcacctatccccaccttatcaccagtcatctttttttttttttttttttttgagaaagaatcttgctctgtcacccaggctggagtgccatggtgcaatctcggctcactgcaacctccgcctcccgagttcaagtgattctcctgcctcagcctcctgagtagctgggattacaagcgtgcgccaccatatccagctaatttttgtatttttagtagagacggggtttcaccatgttggtcaggctggtctcaaactcctgaccttgtgatccactcgcctcggcctcccaaagtgctgaaattacaggcgtgagccactgcgcctggccgccagtcatcacttttaaacccaggtagaatcacgcgtgtctcctcttacaaaacctccagtgacttcccactgcttttaggatagagtccaagatccttagcatgacattcaaggcccttgacatttgccctcagcctagtttcccaatcccacttgctgttatgtatcttcatgggccccgtctgtggccacaccagatgatgtgactctttccagaatgctcttccatccctctctagccttttcccctgctggaatgccttccctctctttgcctaccaagagccaatttgttcttccagacccagttcagatgctacttcctccctgaagcttgcctcgtcttccaggaaaatgtattggtctttcctttgggccaccacccagccctttggtagtctaatcagtttatgtgtctgtcttcatcactgagattcagtttcttgatgatggggacaatatagcaaatgtgatatcttttatctcccctcttgcctagtacggcaggtcttgtacacagtaggtgctcagtcagtgcttattgtctaggggaatagacatttttatggatgcctgaaagatgattgttttcttctgatatgagctgaggagaataaacgcagaacacatccctttgggcatgctgtgatatgggcattctgggattgagggttttgcagcaaggatcctgaagcaggtttctacgtgtcaagtgtgactgagtgagaaatggggtgaggctagtccaggcaactgtccaaggagttggctgctgggcacagcctgaccttgctattctcctgtcccttcgctgctcgctagcccaagagcagccaccagatcttttgtctgttcctccagctgccgacttccccatgtgcaagggcctctgcatgagttgcctcctcgtctggatgcctccacctgttgctcatcatccaggtctcaagctgggaagcatttctgaccccacctcagtatagttacaagcccccttgctctgtgctctccaagcacgtgggttctgcttccagcctgtgttacacctcagctttcttatctgtaaagtgggggcattctaggtcttacacccagagcaacatctgtgggcaagcagcgtgggcatcacttggacactttttgaaatgcagaatcttgggccccaccccacacctgctgaactagaacctgcattttaattggaatgcacagcagtggtctagaagacattgattctcagcctctgttgctagttggaatcatctgggaagctttacaagccactgctgcatgggtactctctcccagaaattctgttttaattggtctagggtgtgacctgggtttcccaggtgagtcttttcttttccttttttgtttttgagatggtgggggcggggggcggtctcactttgttgcccaggctggagtgcagtggtgcaatcttggctcactgcaacctctgcttcccaggttcaagcaattctcccatctcagcctctgagtagctgggactacaggtgcatgccaccatgcctggctaatttttgtattatttggtagagacagggtttccccatgttagcgagctggtcttgaactcctgacctcaggtgatccgcctgcctcggcctcccagagtgctaggattacaggtgcgagccacggcgcccaggcttccccaggtgtttctaatgtgccgccaagtttgagacccattcaagggaggggtgctatgaggattaaatgagagagtgcatacacatcaatgcatgtgggatgtgatttttgttattactgttccaaccacaagacacagtacatgttattggattcgtttgctgaaagtgttttccctgcatgatagtcagctccatgggaacagggtgcttattcatgtcatccccttattcattgccatatcccctgcccttcagcaccatacagacacctagtactcactcagtagctaatggctgggtgaatgaacacctgcatgttattaaagacagagtggccagcttagacctcagttactactgtactatgttttaaccgggaggtgggggagagcgggaaggagactgaggttggtggaatgcttgctgtgtgccacgtgcatttacatcattactggagatgttcctcgcacagtcctggaaggtcagtatcatggtctctgctgtactcaagaggaagctgaggctcaggtgaaggaccttgcccgagaccacgcggtagtaagtgtcggagcgcagtctgccttactgcagaatgcagcatttatgtggcgaagctggaactcttagaaaaggaaagtaaaaccctgtgctcaggagcgcatgaaggaatcgtatttggttttctttgtagctggagagaaaagacccctctgaagacaaggaggacattgaaagcaacctgctccggcccacaggcgtagccctgcgaggagcccacttctgcctgaaggtcttccgggccgaggacttgccgcagagtgcgtggggcgcgcccttgggtgggaggtctgcaggaggctggaggcgcagggctggtgggggtgggcgatggcgggcggggtcagctccctgggggaaggagaggcgtctaggaaaacaatcagaatttaacgaaaagtaatcagtgctggtggagttacaaagattcaagaactcttgagagtaatagctgcctctcagctccattccaatgtcctctgggcctggtctggcaatatttggccactctgtggacccattttcttagttctcattgagaagtcagcaccatctggactctattctggccttagggctggctctcactgattttccctccctctgtgaggaagcccgtcctgctagtggcagagctgggctggggagcagttgctctaatgttggaagggtttgcatgaaggactcctgggccccactgtcttcacagatgaaggacacagatccacaaggtgacccaccatcctagcttgcctgagactgtcctggttttagcactgaaagtgcctgttccaggaaaccctgcagtctccagcaaactgggacagtgggcacccgacttgcaaccatctcttcctcccaggaaggccaatgtggccactgcctggtttctcacagtggttggcccgatactagacccatctgtgtgtttagtaaatgctggggagttataccgaatattctagagctctggttatcaacctgggctgatagtagaattccctgggaagattcaaaacggtccaaatgccggggccccacctccagcgttttagattgactcgagttagggcagggctcagcattggtagggtttaaaggctccccaggttgttctgtggtgaggccccgctgtgagccactattttaaagcatgcattaacacaaccaagccactgtccacagcagagtcagtgagaaggtttgcaacttgggtccctggttacaacttttccataaaggtaactatttgagagtttctgcttcggctgctgacgtcaagaaatgaaatgtacaagcttacttagatcaaatcctgaagaaagcctgtaaataagtaatgggtattaattcagtactaaaacacatgcttaaaaatattctgcacttattgattgcaactagaagtgaggctggtgaacttcaagaggggcatggggaaatagaaatgtttgcttttcttaaggtgaaagagctttgtgttgaattccctgcaacgttgtttgaaaaaaacaaaatagatgggcaaacagatcataaatgtttgctaattgttgttgccttttgtattcatgtagttattagctagcgtataatctttatccccctccacttacttacccactcatatgtctgtaaacataacatgctttatacacatatgtatgtgtatacacataaacatatctatctatctgtatctacatatataaataatctggctgattcaaaaaataatggtttggggcagcatagattaaaaactcttaaaaaaaaaacaacagaattgacttcttggttaacctcaggtaaatcgctgcgctaatagatttaaaggaaaatgtcaaccaggcaccaataatgggatattgttataacaactgccagtccttttctgagtacttactgcccttagtgatgtagatttctaattagtcaggcaggtagatttgatctgaaaggctttgaatgcagggtggggacagtgaactgagctgtttgggactggtgacaaagtggcccggagctctcaggagttgctgctctgagacagtcctccttctggggagcccctgggctgagtccctgtgtgaaggggccaaagcttcttgctcaggtagtcccaggactgcctggagacagatgggggacagtcagggttttagaggagagacagcaggcaggcagtgactggtgtgtccctcttcccagtggacgatgccgtgatggacaacgtgaaacagatctttggcttcgagagtaacaagaagaacttggtggacccctttgtggaggtcagctttgcggggaaaatggtaaggagcaagggagcaggagggttctctcgggaggggactttctggtgccctgtggactgtgccgggtgagagcaagacagagtgagatgcccccaccagaggtgtgtgcacaaggagtggctgatcctggtgcgtggtgagacacccacataggcccagctctcagggactgccccgcacacgaatgtggacaggtctgcctgggggtgtcccagacagacacatagatgtggatggcccaggagaggacgttggatggtggatagtagaggaacatttgggggaaaatggagcaatagcatggaaaccagacatgaaggcataaagatagagaaactatattttaaagatgtgggagaaaaacataatggttatttaaaaaatgttgtgggggtagttgggcagagaaaggcccctctggtgggcaccctagcctcttccttgcagcccaccttcctgccctgaggcgggactgtggctccagtccctgctgacttctgtcccagcccttctctccacacaggctgcccaccccccagtgtctgtgcaccccccacaggctttcctggcagccccagccctcccaggcttcagccatcacctctctgcagagaactccgtagctctccgaaccctcccttcaaccccaggcctctctgtgcctctaaacagttccgcctgctgcccctctgagccctggagggagtcattttctctgcacaaactgccccatatccaaaagcctctgtcttaaccaggtacaaccatcaaaggcagaaaatgtggacctgccttgattcttccttcttttttctctctccacatcccacatgctatctctagcttttgactttaaacttgtccccagggcccatccctacctcgtgcccccacagccactgctagctctttccaggagcattcccttgtctctcaactcatggcattgaatttttgaacagcccaggccatttgtccaagtactggatttgttcgattgtttccttctgttgtttaacttgtttctctgactcctctctttcctgtaaactggaagttaggtctagagactccattagattcagatgaagtatttcggcaagaactcagagtagttgatgttctgcatgtcatatggcatcacaacagagagccataatgtcaggttgtcccatcattagggatgatcgcctgatcacacagttaaaatggtgcctccagacagctcccttataaatcttcccactttgtaattagcaagtaaactgtgggtgatatcttggcactgtacggatgtcctacttctcagctacctcttatctaatggtctaagcatccattgaccttcctgtctgaagaagtcatttagttgggactgcaaagtggtgattttctcattatcattctttttctcttgattagccaacatttttttctgtaaagaagagctttctccctccgcttcgttgagtattagtatggacctcaatactttttatttctaatgttaaatcagtcattattgtgttgatgtatgaattatactgaaggtggccatcaggagcccctttgagctgggctctctctcctcagagactagcacagggtcccagtgaaaatgtacacggggatgtaatgcagattttaaactcgttcatgtggaggtgtaaatgcttactgcagatcctcacctgagtgcaggttttggtgtagactcagggtccaggtcttacgccctgcgcctggcatcaggaggaatggggacagctgcttgaaggtaggaaggaaacaggaagctgcggctgtacgtttttgtgggacactagctccaaggactaggattaattcttccacttgacacttgggggaattcacgtcctgagattgttcttatttcgcattcccaacatggaaggtatttcgatggtggctagaaccaagaccgacatgccttcacattcattggaactaagcctcagagctccggggctccgggctgctcctgggtccctgccagcatctttgatctccctgggtcttctgttctgagatgcccttggctggccctggggatttctttaggaaggtaccagtgtctagggggaggtgaaaggacaaaggcagccaaggcaaggcactgtatacagtagattggcatctgggctcatgcaagaagctgcgcctcccatttttcctctagaaggaggtggagggagttgaagaatgaccttatggtgaaggaggcagctggaatgctccgtcttgaaagtttcaacctggccagcctcctcggtggaccccaggcctttgcgtcctctctgccctaagccacctccttgtggcgtccccgcttctgctgctcttatggcgtgtctcattctgcctgtccctctcttttagcctgcttgcatgtcccttttctctctttacaccctaagctgaagagccctgaggttacattctgtgtacccacccaccccagctggccttctttgcatttccccttatggacacctggtggcagtattatccaagatgtgaaccatacttgatttggccaagttcctaagaagataggagtgtgggagagtgtgtgcgactgtgcacttcatggtatggaagaaagaaaaggtcctgccctacttgtagggcaggacaggaagatttaaaacaacttttttttttctgaattcaagaataaaacccattaattgcaaaaaattgaaaaaaatcagagacaaggaaaacaacaaaaactcccactgcaccatattctgtaccctgcaccaccctggagagaattactgataacattggtttgtattacctaccctgttacctcccctcttcccacttgctgggaaaaaatcatgaaaatattgattttccttattcaaggattctgtatttgccaatttgcctactcactaaaatgtatttgcaagcccaaaatcaacactcatggcactttagtgatgatttgtggacactttcagggctttgaaaaatttgagtctcccagcgtgtatgttggttgctgaggttgaacaaggtgactctctgcctccccgctccaactctcatggagtaaacatgacatgtccatgatcaaaggacatgtatttactccacgagagttgaaacagggaggcagagagtctcaaaacatggtactgcacaggacacgtatcaaaggacacagacaaaatgtgtgtcctttgatatgtgtcctgtgtagtctcatgtttttcacatttttgtgccttttcttggcgacttcgctgtttaaaatggccccaaatgtcgtgctgaagtgctgtctggcgttcctcagctcagaaaggctgtgatgtgttttatggaggaagtgcgtgtgataggtaagcttctggcaggcttgagtcacagtgccgttggctgtgagttcaatgctgatgactcagcaatgtatattaaaaagtaaggtgtccttcaacagaagcacacataaaccaaggttacgtattgatcagttgacaaaaacattgtgacagaggctgccaggaatttaaccctgcttcttctctgaggtaatgagtcagcattcactaattcagggttcatggtgaccttatagatcataactaccatgaataatgagaatcaactatatacatgcagtttggtaaactgcttgtgttgtctcatcttttcttaggttattaaagagtcattgaaatgattttttttgatggctgcataatattctgtcagatgagtataccataacatttgacctattttttggacatatataattcaaattttcctcttttataaacaacattgtgacaaacatcagcatacaggaatctttgtccacactctgattgcttttctgtagggaagtttctagaattggggctgttaagccagggggcttatttttaagtatttgatacagatggacaaatagccttccagagagagtgtactaataatactccattgggtagtgaaggaaggtaaagaaaaaaggtaaagcaagaaaaaaagagaagcagaggaagaggaagaagcagcatggtgtggccctggctgagtgcctgtgggtggaacaggatgggggaaggctggcagggatctctggggccacaggcagtgctggctggggtgtggcagatggaccagctgctgttcaagcccccagacccacatcctggtgaaggtagccaggttgaagtgtttgcgatggaggagggccagatgcctggggcaggggctgaagtagcccgtgtgcatcctatgtgtgtgttggggcagcctgtgccttcttattccagggacctggggcacagagttggcagagctgctcagctgggtcttgttaaagtatcttattttaaaattttgtttatctaatttttgaattaggtagtacatttattctatctatctatctatctatctatctatctatctatctatctatctatcatgaaaaatctccctcttgctctgtaccccatccaacaatcaatccatttcttccttttcaaagaaaaccactgcaattagtttcttttatattattctggttttgtgatgcacgtgtaagcaaatatgactacagattctttcttcatttttttttgagatggagtctcactcagtagcccaggctggagtgcagtggtgcaatctccgctcattgcagcctctgcctcctggattcaggcaattctgatgccttggtctcctgagtagctggtactataggcatgtgacaccacttccagctaacttttgtatttttagtagagacagggctttgccacattatccaggcttgtcttgaactcctgacctcaagtgacccacctgccttgggctcccaaagtgctgggattaaggcatgagccaccgtgcccagccgactatagatttttgtcttttaccttttagcacaaatggctgcacatcacaccactctgcgccttgcttttttcacttaatcatataacttggagatggtttcacgtcactacctagaggcatcctcattctgtttgacagctgcctagtactccattgtacggacggaccatacttcatttaacctgctttccattggtggacacatgggttgttccaaatccttgctagttcaagccatgctgcagtgaatagcctcacacatatgtcattcctcacatgtgcaagtatttctgtaggatgggtgtctagaggtaggattcatagggcagtgggaacatgcatttgaaactacaatacatagtggccaattgtcctctgaaggggtcaaactattttgttttcccaccagcaaaacatgagcatgcagttttcccatagccttgccaacagtggtctatcagactttagagatttttatgaatctgatgggtgaggaatggtattttgttggttttctttgtgtttctttctgagtgggatgaagcatctttttatatgtctcaaggccttgcgtcttcattctgtgaactgtctcttccactctttgctctttcttccactggattggatcgttggtctctcttctttccttactcctctctttgctaactaacacaagggccaaatcctggcactcagccccacacccagccctgtgtggcctttgtctggggctctttttacagggaggagggggaaggtgggggcaggggccagcactgggtggaccaggaatggagacatcatcctcacccctggggacctgaagtctctgatttaagtcagatgctcattaaatgagataatgcacatgaaatgcctagcacaatgcagggcttatcatagtaaatgctctgaaaaggctgctcattattttcatgtgtagaacatggaaatctaccaggatctgtgtatctgaaactgagtctttacctgctgcccccgtgtgtgggtataggatccctggggctggctaaggggcctggtgttccttatggactccaaggccagggctggcctgtgagctgctggtttggatctggtttccactcctgtgaggtttcttgtttgggaaaaacctggtctttaggacagggctggttggaggcagactatggcttatagggtttgtatcttcactgaattttctttcactctctgacctctgtgcatggctcccctctcccatctctgatctcctaggggtcacagtcttcctacatggtggatgatctggggtaatgggcaaaagagccttctgggccataagggcctctgggaaagctggtctggactggactcagggcccccacatttagggtcatggccataatgggaggtatggagagggattttcagccagaggtgtgagttaagggtagaagggctgtggcattcagacagcccaccccacccttacccactccccagctctgggtctgaccttccattgagctttgtctctgcaaagattccctgtgtatgaaccccctgcactaggccccaaccccagggtcttacacccagccctaagggcagccagcatggcagagaatggtcactggctggcatgtggccccgggggagcccagagtccccatggagcttgatcaacttgtcccctccctgtgtcttctagctgtgcagcaagatcttggagaagacggccaaccctcagtggaaccagaacatcacactgcctgccatggtgagcctcctgcccccagcaaacccaaggaggcccctggggctctgggcttcgggaggtccagggctcctgcctccccagcatcctgccagtatcccagacttcagctcggggtagggaggggctgttctatcttcaaaaggactcttctcccaacacgcctctattccttcctcagtttccctccatgtgcgaaaaaatgaggattcgtatcatagactggtgagttctgagtcttggagtctttagggcgggctgtcctgagggggcgctgggtccctcagtttcattcggctcagtgactggtagtaagagtgtgagggagaagtttcaggtgaggtaatgtccccttggggtagccagggatggagagggtgtgggcagttcctcggaagcttactcacacctgcttgttgggaggtaggcagataaggaggaatcatctctgagggcagaaggagctgggaaggcttcctggaggaggtggggcaggtgatggcccggcaggaggggtggggttttgctaagctcaccatgaggacattccagtgaggagaggctcacaaactaagggaagggtctgaaaagagcagagcttcagggaggatgggctgcggtgctgccctgggttggtgggatgaaaaagtagggtccccaggctggaggagccgaccagattgcctgagcaggggacaccacggcagctgtgcagcaggtgaggacagcagctcacgggcgtcttagaaagaccacagcatctaatacttgttgagcacctactatacaccaaaccttgttcccagcaagcacttgacacgagtcatctcatctgaccatcaactcaccgacatcagttcacagatgagaaggcaggttgggaaagactgagtgacctgcccgagctgacagctagctggaaagtagctgaggccaggcttgaacccaagcctgctgtttccaaagcctgcgttcctaaccactagtccatgccacctcctgctagttgaggggagctgtctcttacacttgaggggaatattcggggtccacacgtgtgatctcagggcattgggcttcccaaaaagagagagttgtcctttctttgcccccaagaagtcttggctttgtggttccccagcgtgttctcctctggtctcatgcccatgacacccccaaccaggaggataatgagagactagggaaaaacccccaggccacagagccattaagctgtgtgccagttccccaggcctaaagaaaacagcttgtgagaattagaggagaggaaagagagccgccaggagggcctgtgagggagaggccgcaagggcagcgaccacgggtatgtactgtggggaagcggtttggaggaaagatgtgctttacatcccagaatgatctcttcatctccgctctccatgtgtgccgctctgactgcgggcgatgagctgtgcgtgtctctgcgtgtttgcgcatgtggatgtgagtgggtgcggttgtctcctgtgttgtggatgtgtctggcccgagtccgggtgagctgtgtcaaaggcatcggcgtactgtacaatccaaacacattacagaatctggtggttgcatctctggtttgggttgaagtggcatttttattgtgagtctattttcagacttgctgtattttccaaaagcaaccccaagccccaaaacccagctcttggccagaaagcattctgctgcttcaagttcctatccagaagagtgctttcttcccagaaaatgcagataagctcttgttattacctgaatcctggaaataggatatagtccatatggccttttctctgtaacttaatcttccatttaattcttcagaaattcctttttcattaaaaaaccaaaccaaacaacaacaacaaaaaaaccccaaaccaccccctacctccataaaacagaacctctctcctcccactctccttccctcctctcccaattcagagaagactggaggtcagaaatccaattccttttcaagtgctgaccttttctagggtttggtcatgaagactgggtacaaatgccattaactgtcactcatctggtgctgagaatatcactgtaaaatattgcaggaaatttttactttctagttttgtttttttttttttttttttttttgcggggggcgtggtgggaggatggagtttcgctcttgtcacccaggctggagtccaatggcgtgatcttggctcatgcaacctctgcctcccaggttcaagcgattctcctgcctcagcctcccgagtagcagggattacaggcacacaccaccacccctggctaatttttgtatttttagtagaaacggggcttcatcatgttggccaggctggtcttgaactcctgatctcaggtgatccatctgccttggcctcccaaagtgctgggattatgggcgtgagccaccgcaccctgcttttcagttcttattaatatcatttacttggaaaaatgatacagatctgtctgtgctgacaattcattcttcctaatgtagtgccggcgatggaaaactttaaaaatcaaagcttaatcacctccctgggaaatacaaagaggaagaaaggagcacagaaattgtgcagagattagggtaccttgtagggttaggatttcaaagaaaaattgaagcaccatgccagggtatgcctttcacaatggggctgggatgtgtcatctgaagctgcccatggctaaggcactcacaacagggagagggggtctacggggcaccaagaagaaggggaaattacccaggaggaacttcctgaaggagatgggtcctgcccagcccagtgtttctcagtgtctgcatcattggcatttggggctggaatattctttgctgtggggttctcgacctagtggttttgaccgcaggtctagcctacccgggaagcagcaggtggctgcaatcaaagctctggtctccacgtcagcatatctggcctcaaatcccagctttgccatcttggcaaattatttaaccttctcaaccttggctttctcatctgaacttggggctaattgtagtacctacctggtagtgccgatgtgagaatgagtgagttaagtcacctgatggttttagcacagtgcttggctcttagtacgtgctcaataaatgttagctgttactgtttattattatcaaaggaggcaggagtggggttcagagggagggtctgcataggatgtggttggctaataggtgaatcaagcagttaacctccttgagctcctggccacagtcccctaccctggttggggagccaagaagtgtccccctggaagcaggccctatgccatgcaggagcaatgttccaggagtcaggacgccagggcttccggcctgggcttgcccttcctctcctgatgaccttgggcaagtacctacatggctttaagcctcagtttcctcatgggtgcaacagagataataataaaagtgcttgtttctcaaggctgtgtgagcctcctgtgtgataaaggctaaaagtgccccattacatacaaagtcagatacaaaaaggaatcgtgtattaccattggctacttcaagactgtggccttggagatagtttcttcctggtcacctagttttctccttgatctggacatttctttagctcctggagcctctcagttcttcctgggtccgggaacctggctccctgaacaggccagtccctggccctgcctccttgcctctggcctcctccctgtcagcctgcagatgcgtctgtagagatccaggctggcagcctgggtttggttgcctgatgggatgctggtggttggcgagatgaactagttccctctcagagagtcttgggcaaacctcctgtgcagtgtcttcatctctgggattaccaggcctcagtaacataccaaagtgaagaccagaagcgctctctgcctgccccccgcccccctgtgatgtgtaaccgaggccgcatacttcctgggtgggctgtggcctgcagttcctttcctgtgttcaggccctctctgctcccttgctctagggaccgcctgactcacaatgacatcgtggctaccacctacctgagtatgtcgaaaatctctgcccctggaggagaaatagaaggtatgttccctcttcgttctgccctttgaccccctgtgctctcccccgtaccccctctatccagcttacacttctagttttgagagtttgcagaaaaggggagattataaggcctctgttgcccattttccactgagaagagctctggcaatgaaagagatgtcttacagacacttagggttctccacacttggattgtgggatatgccactgaagggcacaaagaggataattcactcctgcagagaatattggctggctgtggccatgccatccatcaggtcctgccttggccgactgtgctctagcagtttcaaaagctattgaaatagctcttactgttctattaaaaaagcaactcatcatcattttgtaaaattttaagtaaagaaataatctgaaagaatataaaatttacctgaaattacccataagcccacccctccggacaagaactattagcactccgagacctttctgtatgtatgtatatatgtatgtatatgtctgtacatgcatggaagatgtgtgtatttaatacatgggtatgtgtatatatacattagaacaaattgttttgaaaattgctttttgatacttgacaatacaacatagatatcttttcctgttattaaaagttcttctataatacaattttaagtgaatacacatattccattatgtgaatgtatcatgatccacgttaactagttaatgatgaacatgtaggtgttttcaaatttttccacattataagcaactaaattggcaaggaatatttctgtagctgaatctttatataattcatgagtttccttttggataaatacctaaaattggaattgctgtgtgaaaagatttcaactttttttttctttttttttttttttgagatggagtcttgccctgttgccaggctgcagtgtagtggcccaaactcagctcactgcaatctccgcctccccagttcaagcaattctcctgcctcagcctcccgagcagctgggactacaggcgcgcgccaccacgcccggctaatttttgtatttttagtagagacagggttttaccatgttggccaggctggtctcgaactcctggcctcatgatccgcccacctcggcctcccaaagtgctgggattacaggcatgagtcactgcacccagcctaggatttcaacatttttaagacttttgatatttatcaaaattgcccttcaaaaaggctggactactttatgctctcatcatgcccctaggcttattttgctataccctccccaacacagggtaaaataataatattaaaaaagaactttgttaattttataggtcaaaatagtatttcattgttgccttaattttcattttattgatagctggtgaagttgaccgatttcaatttgaatatatttaaataattattttatatttatatataacatgtttatataatttatattcattctattataaatgtcttatttatgttctcagtccatatgaggaaatgtttatctttttctcatacctttgtaggagttctgtatatatatggatattaacttttcccctgtcatttatgtagtaaataattcttgttggctttattttaccaattaatagtttttgacctatagaaatttaaaatttttatgtagccaaatctgttagtcttttccttagggaataaggcagggatctagcattacttttttcaaaattgttctttggtgatacaaacactgtattttgagtaatcttttccctatatttcgaaatgctgcctttatcacctactaaattcctaaatgtgttcttgggcctgttcctctattatcttcaattggtatgtctgcttattatttctttggttttgatatctgggttatgctggctttgtaaaattaattgtaaagatttaaagtcttctctaacatctggaacagtttctataacacaagaatacagtcctttgagggtttgaaataattcacccataaaaccatatgggctgggtgccctttttgagtgggtatagtaatagctctttaaaaacttttcaatttctcctgtgatgattgttatttttagtttgtcacttttactctagtcaattttgataatttatattttcctagaaaagcatccattacgttgaggtataatttatttacatagtgttgtacagagcaaatttttataatttgaataattctctctacctgtggtgttttactttttcttatttctaatgctatgtatttgagtttttttttcttgattagctggttagaagtttattttaaaactttattggacttttaatctttgcactctttaactgtctttagactgattttattgtttccttctttaactttatagcttcttgtctttatttttaaaatttcttatttaaataatgaaagtatggtttctgccttctgtgtcatgctcaaaccctaaggttcagcagaccctaaggttatatttaactctattaatttttttttaacatttaaacatttgatctattttgaatttatttttgtgtgttttctgacagcagtctgatgtgattctttcatagttagtctatttttttttcctgactagatgctgctcataggaatttatcttttttcttatagtttagaaaattattttaatctatcttggtacaggacactttccattgaattttgtctgagacatgatgaattcttaaatccgagttgaggattgttttttaaaaattctgacattatgccatggacagctgaaggcagagtgggggagtggggagagctctagctctccagcccaccaacttgggttcaaatgctcttggctctgcttctttgtaactgagtgagttgctccagtctccgtaaaatggggctcttacaagtcccaaccctcatgaggcggttgtaaaaatcatgaggttataaaagtaaggttcttataatgtctagtacacaataaccttaaagtaacatttgctgtttatcatcattaagatgggctttctatgttgctaatctgatttttttctgtaccaattctgccttttactgcttcgtacatggtttaaaatgggctattgcatttgtagtttcttgtcaagccttctttttttttttttttattgatcattcttgggtgtttctcgcagagggggatttggcagggtcataggacaatagtagagggaaggtcagcagataaacaagtgaacaaaggtctctggttttcctaggcagaggaccctggggccttccgcagtgtttgtgtccctgggtacttgagattagggagtggtgatgactcttatggagcatgctgccttcaagcatctgtttaacaaagcacatcttgcaccgcccttaatccatttaaccctgagtggacacagcacatgtttcagagagcaccgggttgggggtaaggtcatagatcaacagcatcccaaggcagaagaatttttcttagtacagaacaaaatggagtctcctatgcccacttctctccacacagacacagcaacaatctgatttctccatcttctccccacatttcctccctttctactcgacaaaaccgccatcatcatcatggcccgttcccaatgagctgctgggtacacctcgcagatggggtggcggccgggcagaggggctcctcacttcccagaaggggcggccgggcagaggcgccccctacctcccggacggggcagctggccggacgggggctgccccccacctccctcccggatggggtggctggccgggcgggggctgccccccacctcccggactgggcagctgccgggcggagacgctcctcacttccagacggggcggctgccgggcggaggggctcctcacttcccagacggggtggctgccgggcggaggggctcctcacttctcagatggagtggcccgttagagacgctcctcacctcccagacggggtcgcggccgggcagaggcgctcctcacatcccagacggggcggcagggcagaggcactccccacatctcagatgatgggcagccgggcagagacactcctcacttcctagaggggatggcggccgggaagagacgctcctcacttcccagactgggcagccgggcagaggggctcctcacatcccagacgatgggcggccaggcagagacgctcctcacttcccagacggggtggcggccgggcagaggctgcgatctcggcactttgggaggccaaggcaggcggctgggaggtggaggttgatagcgagccgagatcaagccactgcactccagcctgggcaacattgagcactgagtgaacgagactccatctgcaatcccagcacctcaggaggcggaggctggcagatcactcgcggttaggagctggagaccagcccggccaacacagcgaaaccccatctccaccaaaaaaatacgaaaaccagtcaggcgtggcggcgcgcgcctgcaatcgcaggcactcggcaggctgaggcaggagaatcaggcacggaggttgcagtgagcagagatggcggcagtacagtccagcttcggctcggcatcagagggagaccgtggaaagagagggagagggagaccgtggggagagggagagggagagggagaccgtggggagagggggagggagaaggagagggagagggagagggagacggagagggagagggagacggagagggagagggagagggctcaagccttcttttttccctgtcactccttttatattttcctttacttctttgctcctcgtctgttctctcccggcagttctgctttgttccacaaaaactacatcttcttgtactctactgaggattccaaatcattttctgtaatatgcaggtgaatgctttcctgaatcttatggatgtggtttccatatcctggttggctctctgccctctccctgctttattcactctcccacaagatctgttcagtgttggtatctctcacagatagggtgtgtgggtctttctctgtccatccatctcctcagatctttagctggaggacaggttaacgtgcccagtttctggccgactctacccagtgctcttgaagctggagatcgtctccagattctagatctgtaggagacctctaggagttcttctcctagaagaggagactggaggagataccatttttaaaaatgttctttttttttttttttttgagatggagtcttgctcttttcgcccagcctgtagtgcagtggtgtgatcttggctcactgcaacctctgcctcctgggttcaagcgattctcctgcctcagccttccaaggagccaggattacagttgtctgccaccatacctggctaatattttttatttttagtagagacggggtttcaccatgtgggccaggctggtctcgaactcctgacctgaggtgatccacctgccttggcctcccaaatgttaacatcgtttttaagcaagacattgttaacttagacttctagctgcttgatgtcctcagatccttccgtaaatgtaggcagctatcagaggcatgtacctgacattgtttttcattcacttcattcttttaggagatgcttattgaacatatgccttctgtcaggggctgggcatagagggttgaacaaagtattcttggtctcaccctcagggaacttagagtcctggcaggcgacaaacaaatagacaaataaaaatatgggtataagttgtcttaagtgccctcgaagagaaggacatgcatggtgaaagagaataacagagtaggggagagctgcttctgcctgacagaatcaaggaaggcttctaggaggaggtgtcttaggctgccagaggggaagccaccggcacgtgaggagtaggaaagagttccaggcagaggtgatgacatattccaaggccatgtggcaagaaagaaatgaaaagactggtttggctgagttctctgaaacatttaaagggcaacttttaattatagaaaatttcaagtacacgcaaaggtagagaattgtacagtaaactcccagataccctccctgagcttccacatctagctgctctctgccttctgatttccttgttggaactttggactagtcccagaaacgaccttcctgaaggcactgcgaacttcctcttcctgccccagcccctcccttcctcgctgggggaacaatctgttccgggatgtggccccttcactaattgctgttcagatagtttctaaggagggctgtctcctgcacaggtagagagatttgggggtggtaatgcagacagagggtcacctcacaggtcagtactcttggtatggaaggaacctcgtcttcagttttctgactggcactgtctctcatctctcaatccaggggcagacagtggtgggggcacactgtggcatttctgactgttttccgacagttgtgtttcatgacgctgcagccgtgcctaccaccagccccctgatggagagttaacatcccccgacctgtcttcatttctatgctgtgtgagccctcacctttctctgtgtccgcatgagtgtgttggtgggaaggtaagaaagatgtttatgtggtcactagatggcgctcaggtcacgggcaacccagcatgctgcggaaggcattcaaagtcgggaccaccttccatcacagatggttctggaaagaaatgagaatcttcttgcaaccagctaaccggttttgaacatgcagttaaatagcttgatttaagtggcagtaaaagagttaaacttgtgcatccaactggagctgtccttgatgactctcggactctgccgacccgttcctgcagaggtgggtccctttctggggccagggcctctctccggccttgaggtcgggcccttgccttgctcgggccaagcctccccgacttgcctgcagccccctcagaacgcgtcgctccaactttcctttcagcccttttttatgttgtttctccacgttgtgggcttgtagcccattggggtgatagacaacacttctatttcctcactgctctcaaagaccaaatgaaactgaactgtaaaaacaagttctttctctgtatttccccgcctcagggttcaccagatgatttggttcaactagcagtttttgtttttctgtttttgtttttgtttccagtgagggcaagacctgacactaaccttttaaacacctctgcccacaaatttgcctgggcgcactagagtgttccttggaccctgtgctctgaagtattaagtaagaattttgttttttaaaaaagagtgctttccttagaagctgcaggtcttttgagaggtaacaggcacgtgagctctgtgaaacatacacagattctttgataactttatacataggaaactcatgctccataaatagcacttgtatcctagtgttttccatagttaagaaatccaaagttagtctccttttgtctctggaatgtagatgatgctgatttcccagcagttttcagtttctcctcttgcctggcgcaagcgagagtcaggcagccagccgccatgggcttggggatgtgccgagaggcagagggagctggcggggcagaccgcaggtgatggcctcagcttcttcatgcatgttccggggactgtgtgcagggctgggacttgtggctcactgggctgggaggtcctgctgtctatctccttcagcttcccccaggtgaggcagctgggcttcgttgctcgggccacagaactgggagcattcatctgtgttttgggcttccacagccccagcttcctgggctgagggaaaacacaataaaacacttgtgttttggcagaacggtgatgtggactaaatagaggctttgtcttgggtggcttcactggtcactgtgctcttgaactgtctgcagacacaggggcgagagcccgggatggaccttcacacccagagactgcgatccgcccccaagtcaggagtcattgacctaagacaccaacagggctgtgtcttattacacattcccagtgcctcctcctgcacctggttaggcttgctgaatgaacaaatgaatgaaagaatgggtgaattaggttgggtgctgtggctcacacctgtaatcccagcactttgggaggctgaggtgggtggatcacctgagttcaggagttcgagaccagcctggctaacatggtgaaaccccatctccactaaaaatacaagaaataggtggtggtgggcacctggaatcatagctacttgggaggctgaggcagaattgctggaacctgggaggcggaggttgcagtgagccgagattgggccactgtgctccagtgtgggcaacaagagcaagacactgtctcaataaataaataaataaaaagaaagaaagaatgggtgaattaatgaaaaggtgtggttgcgaggcaggctgcttcgcagccacccacttgatcctctgagccaccagagccatgtgttggtcagatggccgatgggattagggggacatctgcatctgggctggacaccagtctgcagccagaattcaaaatcagtctgggtgggaagccgactttgcctctgtaagaagcacatgggggttggaactgtgaccttggcctcattagcccgagataacgggccaggcctgttagtaatcatttagaaggagcttaaaatgtgatctgtttgcttccggtggtccctggccactgctctcctcgggcctgcagctgtgtctgtgttggccctctcgctgttgcagaaaactccccatgagcagagccctggctcgcccacagaaggaaacctcttgctttggagatgaaggtgaccatgaactatgatttttgcagccctggtgtctgctggctggcattcatagctgaggcctcgctgaggagggctgaggggctgggccgggccctccttgctgtctttgccctgtcctcactctggatggccacgctcccttctctcttctccactctttctgtgtctttgtgcattcttccttcacaaagttttcctcaacccttgacttctgactgcagtcacagagctaggggcaaaacgagtgttttctggaggacagcaacaggtaaaggtgaacaaggaagggaagtaatcagcaagttcaccaaccacatcccgggtgtgcacgtgacctcagactgcgttacactttactgttggagaaggagaatgggaagatcagatttgggaagaggcagaaatcagagaggacagtggaggaagactgaggggtgtccgtttccttggcgcatcgcatacctgcctagcagtgagggacagattcagagtccatacatgtgccagagcatttccttccgtgcttttcttatttctagacattccttaccaacattcaggggcacacccaagtgtgtagcgtgttcagcttgtggacagtgtctggctctgtgattccctggaagcggcctgtgtcagaagccagatgccagtgcctgctgttgtgaaaacgcaacgtggagccttcaggggggtgatcctggacacggccactaggtggagatgttgtgccttgaaatgtccctgctcggcgcgcctggtcccaagcacgacctgcctgcgggcttggagtgtggggtgtgccttgctgcctagctctggcccttttgtgtctccccaccctcccgttgtgtctgtactttgttcccctcacttatctggctatcatatggaaaagcacattttcttttctgaattattccttgagtgtattgaatcaagtttcgggtctggttttcaactggcaaacggaacacacagagtgatgggcaggccaggtgggacccccagggctcatggggtgttgggggctgcgtctggaggggccgtgatgatttagtttatgataaattcacagctgggcagagggtggggcctcgggccacatctgtttcacacccgggagctgtctttccatctgtctgcctgccagctctccatccacagcctgttcatgtaacccgtccttctcccagccatgcccaccctaaccccttttccatttctttacgcttcagaggagcctgcaggtgctgtcaagccttcgaaagcctcagactgtacgttgctgtcaccttggggacaaccaggggagtggggccttgggttttggctagaggggcgagggtgctggaggcatggggtttttgatttgcctgaggtgggattgagattcccccacaaaggtaagtccctggacttacctttgctgtcacctctcggcctctgtggagcatgtaaatcatctggaatgctttaaggggcaatttcctcccacttcccccaacccttcctaaatgggataggcttgggctgatgctcgagttagaccactctgtctggtagtgaggggtaggggcaggcatgggggtctggagtggggcagggggagtgtgaggtgtttcaggggccaggaggaggccaagaggagttaaaaactcttggagttgaaatccccaaggtaaatcataattgagatgattaacgcaaataattagtaatgctcctgttagcccacctacctgggcctcccacctctcctgaaggccagtgccctgtctgtgctggggtctaggagacagaaggtgttgaaggaggtggggaggcccctggctgagaggggaggtgaggctccagccttctggtccctccctgtcctggccccttcctcatccctagggtctgggcaggggctcgactcacagtgcatgaccttaggtctagctcaaacgcttctttgctgaggccatttgttttgtgcctactttggcccatccttgtgtggactgattgggtcgttccagagggttcctgtctctggccctgctttctacctttggcattttggaaacaacctcttccccattcctctgaaagggacactgtggcattttagggttttcagagcatggccagtaaagtcccatctgggaaactcagctgtgagctggaaaatgatgttagtaaaagagagcctccagaaaaggatgaaagaatgtggagagatttcccctcttcaggagtgtaattctcgaactctcctctgacctgctctgttaaaaaattgttctttgtacaatgtgtgtgtggggaggagattctgggataaggcaaggccgttagggcagagggtatgtgcctgggggctaccctagggaggaggaacggctagctgggctccatccctggcctcctgggagatggtttctctggttaccgggctctgggacctcttagcccctccccattggctgcagggcctacagtgcctatagaagcgtaggatggagagcacatgcaggacatgctgggggtggggctggggaggggcacgagcagtggagggcctcaaaccccaactttgtgtgctggctgagtgcatgggctttgaggtgacaccattctggaccctgccaccttgtagtcttgtgtttctttgcatctccaagcctcggtttcctcatctgtaaaatgagactaataaaaatatgattgcatctcagcatgatggtgaggagtaaagagacttaggggagggcgtgagagctatcgctcgtggcgttcttctttatacactgacaggagctgcatctggtgcatgtgggggggaactgagggccaggggtgggctcaggttggaaggtggctgggtggagcattgggaagccccactgggccgacccctctgattgccacttgtgtctcccagtggatgactacctgggcttcctccccacttttgggccctgctacatcaacctctatggcagtcccagagagttcacaggcttcccagacccctacacagagctcaacacaggcaaggtaagccggctggagccctggcaagggcaggatgccagatgcccaggtccctcaggagcccaggcctgcatgcagggtcttccagcccctcctgggggcccacgacctggcagccaacccctcagggagttctccttctgccccttgacactgcctctgcctgagtgccagtctgatccttccatgttcctcgccttgaagcacccaggccccgtctctctgtctttgtcttttaggctgagttggcatctggcactgtccatctgggtggcttgtcatatcccccgaactctctgggccatgctttcctcacctgcaggggggatgaggttggctgagggacctcctgggtgcctgagagatgagctacctcagggccagagggtgcccctttccttcccctcctcccctctgtctcccctgctccttgtgacctgacctccctggcagggggaaggtgtggcttatcgtggccggcttctgctctccctggagaccaagctggtggagcacagtgaacagaaggtggaggaccttcctgcggatgacatcctccgggtggaggtgaggggtgtggctctgggtgggagctgggcgtcggggcagggaagggatggccaggctgggactggccttgaggtgtcatggccgagggaggaggaagctctgcccacacgcatcgtgcctttacctccccgggcctcaagtctcagctgtaaagtgggaataaatcaacacttgccctgcttccctggagggatgatcagaggctcagagaagataaatgaaaatattcaaaaagtctagagcttgatgcaaaatgagatgcgattttatattaataacataaggatagctaactgttaagtcaaataagcactgaacatgtatcaggcactgtgctgctgacacctctgccattactgactcctcccagcaccatgaggtggctgctgttattattattatccccatttcacagatgaggaaacaggctcagatatatcagaggaacaaatggtagagctgggccttgtgtccaggaggtagctgtgtggagtctgtgtggtgctttaagctcttagacacagtggtcagatcgctctggtttgaatcctggctctagcacttaccggctgcatcagtttccctatctggaaagtgggggtaatgattatacttatctcataagacagttgtgggaattaaggaaattaatacacatatgcagtaagcacttactaagtgctagctgttgctactatttacattcacctaacacccaattgtctgacccctcttctctcagtcgtaggattgagttcctgccctgtccccatcccgtgctcagagcctggaggggacaatgagaccctttcatcccaggcacatgacagtggcagcccgtgtatcctgaagagctggctgctgagggagagaccctgagtggcatggggcaggagctctggtcaggcgcctggtggcttaaaagccttaagcccctctgaatggcagataaggcccgggttgcccctgcgggcccagtgggagcccccactcagctgatgtggtggtaccatggctgctggtttggattaggggcagcttgaccttggaggagtagctcttattagggaaacgtggccagacacatgcagacctggaatgagcttgttcagttagcaatgaaatctggatgctgtttctttcttgggctacttgccacccgtcagtccagccaggagctattgggtgccggttatggccggggcctgccagacgtatgtcccctccccagcctgggtgcctttctttgctcctcccgtgaccctctggtctactctctgctctcagaagtaccttaggaggcgcaagtactccctgtttgcggccttctactcagccaccatgctgcaggatgtggatgatgccatccagtttgaggtcagcatcgggaactacgggaacaagttcgacatgacctgcctgccgctggcctccaccactcagtacagccgtgcagtctttgacggtgaggcagtgctcctggctgggaccccgatcacaggatcatagagcagggggccacaccttaaatcccgcctcccatggaaagctgccagagtctactcaaaggccctggtcctggccctggcaaacctgttccagctgtccccttgctctcctccaggcaaggggccctgctactagtgcccacagatgcagctcctgggaccagctgtggtcagcattgaccctgacccatcctgatcatttcaaggagtcagccagccttggtttggacattttagggagtgtggccttgggtttcccagggcagctctaacatctcctcagttttgacatgcccaggagccctaatgagagctgcagctgtctgctcaactcacgaagggagctcaggcacctcttcagacactagggaacacgggtacgggccactccacgtgtccaagggggttcttagatgggaagggtgagcaggtgcctgtctctgtcccacgtgtggtccctttcccagctctgccagtcctagccctggagtgcccaggaggctggcactcttagcaccccatcccacccgccctccactcctggcacagcgctcaggcccgtctctccattccagggtgccactactactacctaccctggggtaacgtgaaacctgtggtggtgctgtcatcctactgggaggacatcagccatagaatcgagactcagaaccagctgcttgggattgctgaccggctggtgagtgaaaacttgcccaaagctgcacatgcctatgcatgcacctgctacccccgctgcatggggtgtctcagaccaccacccactggtgcacacactgacacacggctgtgcctactgacctttgtggttggtgtcctctgtgccttggcaataccaggcttgtggtcctgtcctgcatgcttggaagagaaaagaggggatgtgagcaatctgaggcagccccagtgtgcagtgggacacagagcaagggagcagaaggaaaacctatgccacgcagcagggcacggcctggctctcgctcgcttactcactcattacaggcctttggactcgtaatgcacacaagggcttgtgctagaaacttctagccagaagctagaggcgagaggtgagcaagcagttggctctgtcttcagggagtcagtttattaaaggagggcataggctcacttgtgcctctcatacagggctttccaaacttaggtacaggtgacattccaggggcaaagagatgtggggctccgagcagggcaggtggccaaggagcatcaggaaggcatcataggccagtgagggggctgtgtccagtgcaaggagatggggggtgggaacccagctaggccaccattgcagggacctgggggagggtgaccaagccctgggaaggagatggccttggggggaaattgcaggacttgagctacaaggccttggtggccgactggatttggggctgaggaagggctataaggaggaactcaagtggctggggaattgggaagctggggagaagagcagagcatatgaggtcaggttctgttttggaggtgaggaggagccttctggggaaccccctgcagatgctggatgctgcagtcctggcacttggccagaatggaggagaatcacaggtgggcagaggtgtagaggctaagggaggtgaggaggctgggcgggaagctgatggtcctggcagtggctgtaggggtttctgtggcatggatggggacagctggtgagaaagtggaagagacatgtgcaggccctactgcaggagcatgctcagatcagcaggtggagggaagggggactggagaggcctgggcgtgtctgtgggtggggaggtgagcatggcttgaaggaaaggtggacagagaagggaaagaggccatggtggtcccaccttcccagagactggcagctctaggggaaagaggagaccagcgaatgctgagatggggagaacatggagttgatgctatatagctccagtatctgccttctgggcccatcactggctcacagcaagactccagactccaagagggcagggaccgtgttctttccagttctacgagattggtagtccaagtcctgagcacgtgtccttgctcaggaaggctgctgggtggggaggggtgtgtcgggggctgagggacagtccttggcctctcagctcagggctgaggacccatggagagggctggagaagagctcggtaagggcctgtttccctgggaggcagcacagggagtgagcaggccacaggagtttgaggaaggagctgtctgtgattagaggtggcaggacgaatcctggaggagggcgctcttagtctgagcctcattgggtggtagaatctggaaaggagagagggttccaggtggggaaccagagcaggctcggagagggccacttacctgtgggaagccaggcctggtttgaggtagcagggaggagtcagaagccatcaagttctgcccaagtctgcagacaccccctgagctcctcatgactacatgtgaggctggagttacaggcatgagactggatgtatttgggcgtggggagccttggaaggttcttgagccaggatagaccctggtttgttgggcctggactctgccttctttgctctaactgttcactcctttttggttcagtagcagtgacaaggcctgggggttgggtccagcatgcaccctctgccctgtggtgacacacctgacccttgcctgcccattccacaggaagctggcctggagcaggtccacctggccctgaaggcgcagtgctccacggaggacgtggactcgctggtggctcagctgacggatgagctcatcgcaggctgcaggtaggggggacctggcgcccctggtgcccacctctcctggctcaactgggcctgtttcgctgggagtgctcgtgtgtggcagtgagcagtggcacgtctcccagccacgcttggccagcagtccagcccgtgctgagtccaaaggtggtggagccagtgcaggagttgaaaaggtgacattgagagcaggtcataaatctccctgcagcagcggcagctgcgggcccggcggccggctcacctgaatggggagcattgtgtctctgatccccgacctcttatttccctgatggaatctccaggaggagctggctggggggtggggtgacggcgcccctcattccctcaaggccatgtcggggatcatggtttctgtttagctttctattgacatggctgattgttgacttcaggaaaaaagggcccggggtgtggaggcccagcagaggggtgcatctcacatctcctctgctgccatgtggttttggggagccacccatgggttttgacccttggttttctcaacttcaacctggcatgaagaataactactttataatatcttctaaacaaagtgcctggcccttgggaaggatttaataaatggtagctataattattgctcagaagaagaaatgtcaggagacttagctcctggtctctttatctgacttggtaactttgggaagcttctcttctctggactttagttttctcagctgttaaatggacttaaataattgcccctctgctctccacagggttaatatatgcaaatgtgtgaatatatgcaaatgtattctatgctcccatacgcctcatcacccctccctcagcctggctgtacagccctgctgaacgcatctgagaaactgataaccatggtcactgatccagcatcccttctattgtttgtggctcagttaggaagtgtatctttatcaaaatattaccccagagaaatgctcccggcccagtagtggaattccagacaggccattcacccatttcccccaaccttcctgaagcctggcaggctcagtgccagatgcccagagcatactgacaaaggtacaacttcagccctccagggatggttggatgcgaaaaatgggcagaggaggtaaagtgcgttaggaagttagaggtgagcactgtaggagctctaagcaggtgcatctcattcccacaaattgaattcagggaagcttcctggagaaggggatgccccaggtggactttgagggaggagcaggagttagcctttggagaggggactgccagggcaaaggcacagaagcctgaaatgcctgctgcctcctgggtgggggaagtggcaggagaggctgttgcccaattgggcggccccgagggtctctgctaaggagagctcagccctgggagcaaggccgagggaaaggtgatcccagggtctaaatgctgcaatgtgaggaatggactggtggtggcggcgaatggcaggtgctgggaccaggggaggggagactggacatacggcaggtgagctgtgatgatggtgtaactaagacagtgatagtgggaggggtgggggctagggcagcatggactatttaggagggattatgatgacaagcagtcttctgtgccaggcattgtcctaagaattttacatgtattaaccaaccatgaaatcttatgaactagaaagtaggctgggtgtggaggctcacagctgtaatcccagcactttgggagactgaggcagacagatcacttgaggtcaggagttcaagaccagcctggccccatctctactaaaaatacaaaaattagccatgtgtggtggcgggtgcctgtaatcccagctacttgggaggctgagacagcagaattgcttgaacccaggaggtggatgttgcagtgagctgagattgtgcccctacactccagactgggtgacagagcaagactctgtctcaaaaaaaaaaaaagtaaatgaccctcgttttacagataggaaactgaggcacagagaggttaacttgcccagattcacacacctggtgagtggcagaacccccttgctgtgctgctctgtaatggacagaacctgatgatggggtgaatatgggagccacaggagggttcagaatgatcccctgatcctggccaggggggctaggtgggcatgggggctgtgctctgagagggtcagcaggaggaggagccagttgagggggaggtgaggcattcaggacaggctgtgttgaggtatctgtgaggaagctggcctgtggtctggaggtgggaggacagagtggggttggaggggcacatatgggcacggtcagcctgtggtggctacagccactgggtgagctccccagggcatccccggggccccagatcccacctgcaaggtgactcatggtgccatgttggcaccaccttgggtgaggtgggtgggccaggactctgggttctacccgtggccctgcacatgacccccgtgttgtttgtagcttggcaggtctgaggagcctggaatatctgagacctgtgggccctgagtccttggctgccctcagtgacctctgcagggctctgctcttggaggatctgcctacaaacagttctggcgcctttgagtcactctcctggggttggaagagtggctgggcctcccagcagggaggctggttccagctcaggagcttgggaggggaactgggttcccgtcctcttgagaatgcataatgcctctctgggggggaattccaggcagcaggagcaattcgctcagctccacctgaggccactgagtggcccagcacctcagctagagggcttcctccacctctcactgcagtgctgagcaccatcacagctgataggcagagcagccgggcatgggggccctgagcgaactcaggcccatagctgaacacagcagctcaccctttctccagtcagcctggcccacttctccagcatcggtgttcctcattccatctcagcccttttcccggctcatcttccgggagcctcccccttccccagggctggtggtgtccactctgttcctccagcccagccctcttctctgatctctagacctatgaacccaaggtgctggacatgtccacgtggatgtcccaccagcacctccgtgctgcgtctggggctacacatgttgcagacaggtttcatcacctcccagcactgtcttttcctgggtccccagaatccacgctggaaacctgagccagctctgactgccctcctcctcttttctctgccccagccctggtggctctgcctcacccatgtccttcctccttccttcctctcccacccctcctttagtatccccatcgtcttcaagctgtgtcatgcctgcctccatgtcagccctgcagtggctgctgctgcatccaggaaaagcccctgctctcatcctggtggacaggcctttctgtccccaccacctgcctcacggagccctaacgcttctgaagctctgcgctagtttgtccggccctcagcacccccacccctacaggctcccccttgcctctgtgtctttgcacttgtgcacatgctgctccatcagccaggacgcccttcccactctttgggccttactaacgcctgctggccctgccaggtgcagctcagggccacttcctccaggaagggctcctgactctgaggctgctcaggtggggatctgtttgcgtctctgttctgcggacttcctgagagcagggccaggtctcatctctggaggcagcatccagtccaagcccagggcagagctgttgctcactaggagtgaaatgaatgccccgaggccagttcatctttcaggccggacactgcccagggtacaggtatccacctggccccgcagaggcaggcagggaccttgggagcagcccagcccactctgctctcagcctgctgagccctgcgctgggcctacctgcaatttccaagtcagccggcgttggcggggcccctggctttgcttagggctgggtggagcgccatcagcctcctcttcccggtctccccttctttccgtaccccctgccttgggctttcctgaggagggaaagagccgagacagcacggagacagcttgttagtggcactcacaggtcctaaatgtttcttggggagtcttggctgggctgtggcctccatgaaaatctccctttggtggtctgtactgcagcccctcccggctcccgacccgggctgggcgcataaatcaccctggttggctcggctctccctatccctctccagacccgcttgcccccgctctcaggcccactcaggcctggttcccaggcaggcccccgccccgctacccaccgagcatgcccctccaccaccgaggagcggcctggggcagcccatccgcggcaccctcggggcagtaaatattatattactacagggtgtgcagtacgtgacctgagacaggccccggggcttaagtttcccgagatggagtttgcgtactgctccccccatcctaaaaattcaattaaaaaaaataacaggaaaaatgtagtgcgccgagggcctgccagagcggtgtatctggcggcggcggtgccgctgcgctccggcggtaattggttctgcatagctcggggaaattggcagaaaaataaatcagccgggagccgggagtcagacgctgcagggaggggaggtggggggtgctgcaagtggtgggagcagacctggtggagcgggtttgactaatgtcctgtttgggagtcaagggggtgaggtgggggcagggcagcccccataccctcagtggagaatggaaaatggagaggagtcccgcttggttagggagtgcacagactgccccgccgcatttctgcatggcccttgtgtgggtaccgacccctggccttggaatggcgaggaggagccatatgaaggactttcagggcgcctccgtgggatgggggaggtcagagttctttgcctctaaacaggattgagcttaaacctgacctcctgtctctcagggctcagggctgtgtttctggcattgcatgtaccccccacctcctctccaaaggcttcccaaagcagagtgttctgggaagggttctgttgtggctccccaccccacctcaggtggatacatctgagctgctggcctccctgcagtgcctgcagtagctcttcaggggttcctaaatttcttccttgaagaatgtggacacagcacagagcagacttgtttcagtgcagggcactcagcgctggagcctctactctaggaggatccaggaggcaggagcaggaccccctgggccctccgagagcctgtagtcagtggggcagaggggaacacacatgcaaaagaactcactggactggagttgaggacagattccaaactggcagtcctggaatcgagggctgggggctccagatcaggaggcgcgtaggctgacatgggtgaggaaggcttcctggaggaggtgagggtggagcacatcacatagagatggctgtgtgtgtggagcgggctggagaaggcacccagcaggcaggcggagggggtggggcctgctgtgagaacctggcacatgtgcatgcctggacctgggagagccctgggctcatcaggcgcattccatctgtccgtccctcacagccagcctctgggtgacatccatgagacaccctctgccacccacctggaccagtacctgtaccagctgcgcacccatcacctgagccaaatcactgaggctgccctggccctgaagctcggccacagtgagctccctgcagctctggagcaggcggaggactggctcctgcgtctgcgtgccctggcagaggaggtaattaagcctgggggtgcctttcttcttctgctctcctgctgcctggaacatcagaactggcagggacaaggcgaatgtctggattattacccaccccggttccattgctgggtgaccttgggcaggtgacttaacctctctgaacctcaatggaccaatttgcagaaggaagagagagggtacgatggaatactgggtgttatggggcccagcacagagcctggcacacaataggtaactaataaatgccctctgtttgccaaagtatgtcagagacagagctgggaccagaatccaaggtacctggttctaggttcagtgccagggccagcttccccaggttcccgactcctacttcctgccagccagtgcctgtctgcacctggccaacaacctgccctgcctggaccctctgtttcctgttgtcctggatgcctctgaaccccaggcccaaggaggcttcattttcagtaactctgagttttgctgaatctgatcagagagaaccggctctggtttgtctttggggaactatttccccacctgcagaccctccccctgaggtctctgtggccagatgcacccacccggttctgtggcaaataggcaggtccggtatttgtctggaatgagaagcgtctgctcataagtgttgggcagacacagctgctgcctgctctgaccagagccctgtgggactcccagggaggaggtaggggctctccccaggagtgtgagaagggcagggccaggagagcggttgctggaggaagctgtggaaggggagagggaggctgctcaggaagggatgtgggtccctggagtcagcagggcctataggcacaggctggttccctggtggacactgtgtcgctcagctgtggaccaactcctcacagtggcagcagaccaacccctcaggctggtcacgggcttccctctgtaatctcagcccagactgacccgtgaactgtaagcacaaattgtgatatggctggaaggggttaaggtcgaacagtgctgtcactgtaagggccccgtggagagagcccttctcaaacttgcatgtgcatcagaatcccttggagggcttgtgaaaagcaggttagggcccacccctcgagttcctgcccccctggaactggggcaaacctgaaaatatgcatttctaacaagttcctggaagctgctgctgctgtgggtgccacactttgagaacccctggtatagtggttaggaacacatatttggagtcagaaaaacctgcattggctcctaagctctcaaagcctgaatttcctcacctgtcaaatggggctgcctgtcctgcctcctgggcttgctgttggggttcagtgaagcgacgcatgggcatgcttcacctgtgctgcaggagcatcagctcagcaggaccctgggtggagacctggggctcacttgggctcactttgctcatcatccttggaagcaaatggacccttacccaatcagcctgctctccagagtgtgcagctgggagcagttgtcaatcatgctggaggggcttaggggcctcacagttttgttctggactagtcaccattttcagagtccagtgtcttcaggccatgggagtcctgctgctacgggaggagggtgtgtgtcctctgggaagggcataccttctgtggatctgttcccgctcttggggctgaggaaggcgggtggtgtcctaggcgtaatgttacctccctggtcaaatctagttctctgatgtttgccccctgggaatgtctacctggtagcgaggacctaagaatgtaaggtttgaggtccaggcaggagtgtctcttcccagaaggatgtactcagctcagtaaccttggtgggcttctcatgtgagctgggggcagccttatgctctgttctctgggggctcaccgccactcaagccagacactggccagccctgggaggtctgggggaaggccagggtggacagtgtgtgggatggaagctgggagaggagaggcctctgtggcctctgagtcagaggtcagctcacggtgtggctgtggggcgtgggcctggtgtgtcaccatccccaccccgaccaccaccctctgttcagccccagaacagcctgccggacatcgtcatctggatgctgcagggagacaagcgtgtggcataccagcgggtgcccgcccaccaagtcctcttctcccggcggggtgccaactactgtggcaagaattgtgggaagctacagacaatctttctgaaagtgagttttcttttttcccaagtcatgatcgtatttttcccaacataaggcctttctcccatctcttctgtttcccctcctgttcttgacctatcttagttcttaggctgtggtcttggaaggagaagaggtctttgggtaaaacaatttcccttttcctcggttacccccgaagtccccaggcccctgcacctagtctaggaagttagtaggtttgagccggaatcactggcgctgggagtgaatgaggtggagtctgtggcccaggccatctgggagggctgacccctggggctgtgtttgtccttccaggcaggtcccttatagggaggcctcatcctcagttcccaggcactagcaggccttgcatgacctggcttccacaccaacccgagtgccctggactggagctggagccactctgaggctcaagtcctccctgctgggaaggctggtatctggggcttgggacaggcacaccacaatctggacccactggagagctgggagcatgtaattctgtcccctggtctcaccagcccccacctctcctgccctttctcctcttctaacacccatccctgctccctcttcctcctttccaggagggtcaccagctttggggacgggtgacagggaggtgagtgggtgcttggggagagcccatctgtgctcctctctaggctcatgcgcggacatagagccaaagctgctgtggtcatggtgtggcctggcgtgcaggacacaatgcgggagatccctccctgcacgatggctgcccaggcccaagggagggccctccttgaagagctgtcagcaaggctgcccctgcttggggaggagtggccctgagaagcaggcctgctccttaccttttttttttttgagttggaatctcattctattgcccaggctggagtgtagtggtgtgatctccactcactgcagcctccgcctcacaagttcaagggattctcctccctcagcctcctgagtagctgggattataggcgtttgccaacccacccagctcttttttttttttttttttaattttagtggagatggggtttcaccatgttggccaggctggtctcgaaatcctgacctcaggtgatccgcctgccttggcctcccaaagtgctgggattcaggcgtgagccaccgcgccagccctccttacctcttttcatttgccctgaatagctctactagcattcaaggactcctcagcctaaggcaccagactttcatccagcctagtccacctccccaaagcccctccacgctggaccttccccttccctacatctctcctccctcctcccctcttccaggaagtcgttgttgacttactttagcctggaaccctgaagcagagccccctgagtgatgctgatgcattcatatattggccagtcctcttgttgtcccctggggggtgtggagagggcaggtttcagtagcacagaggatgccagggctggttggagctctatgtggccttgggcaggttgcttaacctctctgaattgcctgttgtcttatcatctgtaaaatgagggtgggtggggctgcccactttacaggttttgagggttgagttaggtgacacaggtgatgggtcttgctggaactaagtgatcaatggatgttagtttctctccccacctctccccttttccttttggggagctcccctgctctatgcgtgccatgactggaggccaactcaaggccagggatagtagatgtctgcacacagttgtgtgagtgagtgtgtctgtgtgtgtgtgtgttgggcagcaggctgcccccatccacctgctcacatgccacctggggcatgtttcccattagattctaacctcctgtgcttgtcagagcctaacctctgagagtctacctcctaagccagttcctggcctggtagggcagaaaggaaaggaagtcaaggagtggccatatctgagtggggctgaccggggaaggcggtctgcgagagtggcgggggcggggcggggggtgctgctgaattgtgcctggtggacttgctgggaggggatgagctccaggttctgacctcttggccatgtagcctcagggaaatgcaaactgaaaattttccctggtttcaagcaaaaaaaaaaaaaaaaaaaaaaaagatatagaattgtttctcgaagtcttccccactgagtttatgagccccgccagtagctcctgagcaagctctacaaaaatgttggcagcaagcagagaccaagaaaacattggtgtttcttaacttaaaccaaagttggaaaaaatgagcaccagcagagagagagaggagccccaaactagacatttctttatttgctgttgctattttgggtccagcaggctggccccgtctcggggaggacaggggagagagccgggggtggatgggggaagtgggggtcaggcattcctgccatctccctggggctggtggtttggagggtaaaggcagttaaccacccgggggagaggacagccgaagcgaacagccatggagaggtttccccggggcatgacacgtggactcaggggctcctacaggcttcattgaagatgaaccaaaagaaggggggctgtgtccgcaggagggaagcgtgaggtggccctagccttggcatgtcctctgccccttcctgagcctcctacctgccctgggctctccctccagggatccaggcctccctgaccagcgtgggaccccttacctcagctgccctttcatcttctgaacccacccgttttctcacttggctatactgctctgagctcatgacactaggcctgggtacttaatgtgttgcctcctctaggggacaatgtgaattttaagagcaggagcttctgctcctcaggccatgtctgacctttggtttcaatcaaatggtgaagtaattgtggagaataatttttgtttcatgttgggttgttgtggttattccatttggcagagcttctgaaagtttcaggaaaaaaagcagttgaagaccagtgaatagtggttgacatgctgataatcacttgaaagggtagggatattagatgatacagtaaccaaagaaataaaatactaaacatggagggggaggctttaatttcttctctttccagatctgtatcattgtatctcctttagagacaagttttagaactgtgctgtccaatatggtagccacagatggctatttaaatttacattaattaaaagtaaatgaaacgaaaactttatctccgcagtcatactggccacatttcaaatgctcggtagctacatgggcctagttgactaccatattggatggtgaagatataaaccattttcctcatagcagaaagttccattggcaagcactgttccagaagaaaatggaagcgaggctgtggtgggagaaggggagaggagaggtcctgggctagacatggttcttctctgcagagcgctcctaggagggaatgatgtagcctttgcctttgatggggaggaatcttggtgaggggtagggggtggggtggacgtttcttaattgcacactccccttctatgcaattctggtaagcgctcccacaggggacactcccagtgagggtgtcagcctgctctacccaggcttggaggactcctcctccccagcctctcactgggacatccggatcctgaaggggactgtgggtttctgtccttctctggtacccagtatccgatggagaaggtgcctggcgcccggatgccagtgcagatacgggtcaagctgtggtttgggctctcagtggatgagaaggagttcaaccagtttgctgaggggaagctgtctgtctttgctgaaaccgtgagtacctgccagcccccacctctgcctcccactacctggagctgccttggccccctgctcacgcctcattcttcctggccctccagtatgagaacgagactaagttggcccttgttgggaactggggcacaacgggcctcacctaccccaagttttctgacgtcacgggcaagatcaagctacccaaggacagcttccgcccctcggccggctggacctgggctggagattggttcgtgtgtccggagaagacgtgagtcgtgggcagggagggctggggagagccaggccaggctgcccaccatggactgcaccctccttttggaggcaggctggggtctgttgatccctctgcttgctcctgcgctggtcataggaacttccgctgaactctcccaggactgaggcttgccaggcagcagtcctttccagaagggcttggatggtcagacagtcctttattcttttcattaaaaaaatttttttttttttttgagacagagtctcactctgtttggaggctggagtgcagtagcatgatcgcagctcattgcagcctcaacctcctggcctcaggtgatcctcctgctcctgccttctgagtagctgggaccacaggcgtgcgccatcatgcctggctaatttttaaattttttgtagagacagggtctcactgtgttgcccaggctggtcttgaactcctgggctcaagtgattctccctccttgaactcccaaagtgctggggttacaggcttgagtcaccacgcctggccaggcctttattctctctcttttttttttttgagacggagtctcgctcggtcgcccaggctggagtgcagtggcgcgatctcggctcactgcaacctccacctcccgggttcacgccattctccggcctcagcctcctgagtagctgggactacagctgcctgccactacgcccagctaattttattttgtattttagtagagacgaggtttcaccatgttagccaggatggtctcgatctcctgacctggtgatccacccgcctcggcctcccaaagtgctgggattacaggcttgagccaccgcgcctggcccaggcctttattcttaagccttcgttctgtgtggtgcccactgggtgtggccccatcctcaaagacacccaggacaagcccatcacctcctctgcacgtgaacccttctcgtgtctgggctgctcacacatcccctgagtggtcctttctctgtcagtccctctcagatccacgtggtccttctccatgtctattgccgcctttgcctctctctcctctccttttcctgtttggttggcattcaactctgtggtgtttaacttttttttacttaaaaaaattgaagtataacatattatacagtcaagcactcaaatcttatgagcacaacttgataaaactttatatttttacaactatccatcaagcctcgactgcccatcctccttttgctgtcttcagttggcccccttttctctttatcttgggtgatgtgctcttttgtccccgattatctcggagtgtccctaggtctccttttcactgtctgccttggtctcttgcacccttccctccccaccccccatgtctctcattgttggttggggtgaggctgacatacgcaggggtgctctccaggaggtggtagatggatgggggcctctccagcagagcagcagagactctgaccagccctcctccacagtctgctccatgacatggacgccggtcacctgagcttcgtggaagaggtgtttgagaaccagacccggcttcccggaggccagtggatctacatgagtgacaactacaccgatgtggtaaagcaggcactcaggggcaggtggggtctagacatttggtctctggaggcacctggtgctcagggacaggtggggcatgtttctctttgccccctcttacctccggagacttcatgctttgatttccaaagggaaagtgtggggtgcagtggtggcaggacactgactctggggctctgcccttctgtctgggacttggaggacgtatgttgtcaagttgcatcttttctgcctccctgctcacatctgtctgtctcctctcattgcttgcctgttcggttttgtccttagaacggggagaaggtgcttcccaaggatgacattgagtgcccactgggctggaagtgggaagatgaggaatggtccacagacctcaaccgggctgtcgatgagcaaggtgggcagcatgtggaacctggcgagccccatccccggcaagctctcaagccatgctggtggggacgactgaatgccagggcccttcactgggctatttcacccagggacgcttcttgaaggcaccccccactccaagctgcaaattaggaccgagagtcagtggccgctcaagagtctgtgaccatgccccaaattcagagatggtcccaggagagatggggggaactgccaagcaatgagtgaccggttccccctcccccaggctgggagtatagcatcaccatccccccggagcggaagccgaagcactgggtccctgctgagaagatgtactacacacaccgacggcggcgctgggtgcgcctgcgcaggagggatctcagccaaatggaagcactgaaaagggtgagccagcaggtggtgggtgggagtgaggcctgtggtcacaggtggccagtaggcacagatgcagacctgcatgcccacagacacatgcatgtgtgcacacagcatgcacagacacctgggactcactggaggtgctcacagatcacacccagcatacccaaagatcacacccagcatacacacagatcacacccagcatacccaaagatcacacccagcatacacacagatcacacccagcacacagatcacactgggaacacccacagatcacactcagcacacacacagattacacccagcacacacacagatcacacccagcacacagattacacccagcacacacacagatcacacccagcacacagatcacacccacagatcacacccagcgcatgcacagatcacacccagcacacccaaagatcacacccagcacacacacacagatcacacccaacacacccacagttcacactcagcacacacagatcacacccaacacacccacagttcacatgcagcacacccacagttcacacctagcacacacagattacacctagcacacccagcacacgcacagctcacacccagcacacccacagatcacacccagcacatgcacagatcacagtcagcacacacagatcacacccagcacacacagatcacagtcagcacacacagatcacacccagcacacacacagatcacacccagcacacacacatcacacccagcacgcacagatcacacccaccacacacagctcacacccagcacacacacatcacacccagcacacgcacagatcacacccaccacacacagatcacacccagcacacacagctcacacccagcacacacacagatcacacccagcacatgcagagatcacacacagatcacacccagcacacccacagatcacacccagcacatgcacagatcacagtcagcacacacagatcacacccagcacacacacagatcacagtcagcacacacagatcacacccagcacacacacagatcacacccagcacacacagctcacacccagcacacacacatcacacccagcacatgcacagatcacacccaccacacacagatcacacccagcacacacagctcacacccagcacacacacagatcacacccagcacatgcacagatcacacacagatcacacccagcacacccacagatcacaccgagcatggatcacatccagcacacccagcacagatcacactcagcacacacacattacacctagcacacccacagatcacacccagcacacacacagatcacacccagcacacccacagatcatacccagcacacccacagatcatacccagcacagatcacacccagcacacccacagatcacacccagcatggatcacacccagcacacccagcacagattacatccagcacacccagcacagatcacacccagcacatgcacagatcacacctagcacacccacagatcacaaccagcacagatcacacctagcacacccacagatcacacccagcacacagaaatcacacccagcacacccacagatcacacccagcacagatcacacccagcacacccacagatgcttatagacagacacactcagatgcccatgattacagaaggtcacatgcaaagttcacacaccaacctggaagatggaaagacacccatggactttgtcttaggctgggtttcctggaggcagaagctaagacgtagatttggctgcacattattggggcagtgccctcgggagtgtgaggagcaaggatgcagcttcaggcaggtcagctgtggcctgagctgtggcctggggaagttcacaactcggaacaccacagaatcctcacctggaggcagggctgggctttgtatcctctcagccatctgtctaggcttggggttgctggggtgagctggggcacatacctatctcttcagtgagggggtttcctttagcatgggggttccctggagcaggtggcttctgggagctgggagctgtcgatgctgatggcagctggggatgggtgcgccacacgtgtacattggctggtgagggggctggggtgggccccgttggcattcatgcaatgcaagcacacatgcccacagttgagcacagatgccatgggatactgtcaggcccatcgtgcacatggatgagcacacgcaagcacatgcacttgctccggggtcacacaggggcctgtgcactgcacagcctctgtgcccgcctgtcctggaccttcttggtctatgatcttccttcctaaacacacatttgaattttggctcaagaaccagacctcccttagtccaggagtagcctgtggcatgacctaggttccttcctttctccttgggggcagagaacctagagaggactcttgctggctccagggaggggcaaggcttttggacaaccagctgttcctggtgctgtgaaccagacagattcaactttctccctgaaggggcacccagcagacagaggcaaagcctgcccaggctcatgtgccttgcccaccaccccacagccagcatccttcctggagagtggcacagctggcctccaggactggcccttgtcactgtgctcctggcccagacctgaggtggtgtctgacaacagtgccaggtcaccctctcccaggagctgaatggcaagggggctcccgggactcccttcaggcccaggaaagggaccccatgaacgaggtacaggggtgcctccatagctgagttgggtctagctcccaggggtgaaattggctgtggttgggaaataggatcttccttttacctctgagctgcagacccactacaggatgtgaagatgaaaaaggaaatgacaagaaaactttggattcatgaaatccacccagaattcaaacaaataagcaagttaaaagcccagtgttttcgtcactgcgtcagcctaccttcctttctggctgtttggttcttcccgcagcccatggagcctcctctcccctcctgatttttctttttcttttttctttttttcttttccttttgagatggagtctcattctgtcacccaggcttgagtgcagtggcgcaatctcggctcactgcaacctccacctcccaggttcaagcaattctcctgcctcagcctccctggtagctgggattacagacatgagccaccatgcctggcctcccctcctgattttctgacctggggttcctgtggctgcagaaagcccctctcctctaggtggccctcccaggttttcccacctggagggcactagtgtgggagctggtggggagttgtcatggaagacaggaaggcaaaggtggagccgagcacagaactccccccagccttcccaccggcctctgagtctgccccttctcttgtgcagcacaggcaggcggaggcggagggcgagggctgggagtacgcctctctttttggctggaagttccacctcgagtaccgcaagacagatgccttccgccgccgccgctggcgccgtcgcatggagccactggagaagacggggcctgcagctgtgtttgcccttgagggggccctggtatgtggggctgcacttgtcctggcttgggtagggtatatcttggtttcccagggctgttcgggctgatgtgggagaggcacagggaccccaggttaggacttttggatggaacgctggctggtcatcctggcgtcagtacctgtggggtggcatgtggggaaagcagccccagtctgggtgttcttctaaaatgaaaaagctccttccttggcactgaaacacttgctgctactactttgaggtgtcaagatgaaagcagaggggaagatggccttggccgtctggctggcctgtgcctggctggctggtgtgaagatgggcgaggaggcccatgggaggagtgagagagttcttgtggccccagagtgtccttggttgcatgtgcatcctcttgaggcagagaccatctcatggtcatccccagcaattttggggaagaggtgtgccttagaagctgagccccaggatgactttcctgcccagggtgcgctttctgtagccagtggaactggggtaggctcaaggttctccagggccggggtgacgggctccccaaaagagacgagcaggtgtctcggggacagtctgagcgagcactcggtactggcacacagccagtccccactctgctgctctggggaaggagctgctccctctgaaatccagccaggactggcacctccctaggggtttgggctggggccctagggagcaagccccatgggacgtgagggtgtccatgtgaagccagctgtgtggttggggtcaggctgggcacctatctgtaggacagcctggctttgaaggctggaggagtgctgtggggtggctcaggatctgttgggctggccactggcagggaggtgaagccagcagtggccctgagagggagtgggtgggctggggaggctctgtcagtctcaggcctcgatggtgggcaaggcccaacagtggcagtataggagaggaagctctctgggggcctgaggacgtcagaggagcctgccataggcttcggagagagcccctcccttgccctggggccaggtcaaggggaggctgaggggagatagcagagctctcggctctctgggctatggactggtcttccggccagggtcgggcaggataggatggaattgctgcccaggtcagagcagctggggagccttctggggtggggctggtgttctgtggccccctctgctttgagtcagaaagggcctggcctgagcactgggcaggggctggtgatgatcctgcggctctagctgaggggtggggtataaagaccttggcaggcctcagagtcagggccaggtctgagaaggccaggaaagcaccctgtgtaatcaggatctgttttcatcagccagagctctactcaaaggggctgagaagaaaagtggtttgtgggctcacagagctgggaagaacccgagaggtgaagcaggcattaggcctggcaggaaacaggttcatacagtgtccccaggactcgcacccctgtcttggccttgtctcacacgggctctctctgtgtggtagcaaagatgctgctggtgacgaaaggccaacatcatccctccagccagcaaagtcctgctagataaagtagcccagcccacagcgccacactctgttttccatgcagctggagacccctgagtgctgccttctcagtaatgtcagtgaagtcttcggcatgactgaccagctcagcctggtggtgcccagccagcccctgcacctgggtgagggatggagcgttctgattggccggcatgggccatgccccttctctgtgattgacagtgccaccagattggggagaggagcttctgaaaacaaaaacaaaaaacaaaaaccaaagcaatgttgggcaaagagctccagatggtccagacggtgaccagagcagtagggagccagtatgagttgttgacaagaagagtgctctggtcagagctaggctttaggaccatcagtcaagcagccatggaggatgcttgggaggcagagcctcccatcaggaaaccccaggagtcttgtgtagagatccaggagaggtgaccacctggcgtgaggccgtggggctgaggtggagggaggtgggactgaagggtttggggagggaagggccagaggtggacagtggggaccctgtggttgccaggccgcagggcggggtggggcgggctgtgatgagttcacggttggccctggcaaggctgacacacacggtgaagtgctgtgtgagggagacagagctgacggctgcctgccaggcggcccagggcaggaaggctggagcggggagccgagggggccgggagtggggaagaggtgactggagacacgtggacaaagcgtggatggaccctggggctggctagggcctggaggaagaaagtgacaaggctgggggacccaggccaagctttcatggctcagcgcctgggagaatgagggggggcacttcccagaagcagagagaccgatctgcgtattcttcttgtggaagagactgtcctgagggatcactgaaactaggcgtgaagtcagcagccatgggcgggtgatggattgtaattcacctgtgacttgcctatgatacatggaagagaccaaagtggcaaagccccgagtcctgggacagcttggctggcagagagaaccagaaagggaggcggtggcttcagagggcagatcccacagacctgcagctggaggaccagagagttttggaaggtttaggtgtgtctggcatttggacggggccacaggcccacttgactgtctggaagactctatacctgagtgacacacactcacacactgtcttacacaccagcacacacaccaacacacactcatacacaccaacacacacactctttccactcatacacaacacactctgttacacgaacacacacaccaacacagtctctctccacacattcatacacaccaataagcacactaacgcacacatacacactcatacaacacccccacacactaacacccatacacactaacacctacacaatcacactctcacacataccctcacacacaccaacacactctctacacactcccatatataccaacacacacacacagccccactctcatgcagcccccccactctcacactaacacgtacacaatcacacacataccctcacacacaccaacacactcatacacaccaacacatagacacacacacattctgacatacactctcttacactcacacatacacaatcatatgcacacgcacccacacacactctttcacactcacactccccctccacagtcacgtttccgtcttcctgctgggacccagaatggtttgggctcccgctgctgagctgctgtctttgtcccgggatgtcctgatgccccagcacagcactggggctaaggtcctccctgcctcctggggaaggtggttggattttctgggtgctaggacccggcttctgtcctgagagctggtctttgcccacgggtccctgatgcctggtgattcattggtgggatgggtgaggcctctgtggcttgaattctgctttccctgcttactagctgtggacgggtcactcatgccattagcaactctgttacctcactcgtgcaagtaactgaatcccagggccattttaaggatgaatgacgatgcatgtagtgaagcacttctcagacttagcaaaagcaggcaccgtctggggatattgttaaaatgcagactctgattcagggtctggtgggccccgagaatctctgtgtctaacaagcctccacatgatgctgatgctgctggtccaggggccatctcggagtagcacagatgtgaagtacaaagtgcctcatcaagatggggctcccattggccccctacttgggtgcccttctgagagaggcagagcatgtgcattcctgctgggaggtgtgtggccagggtcctggagagggaggtatggcaagatgacatgttctccctgctgcttggtgggggaaatgtggtctttacttctaatgatcccctgatctgatggtggaggcctggctcatggggaactcctgtctgatcaagaagagagatgttcacatgtgagtgcaactaaacccctagaatctgcgtctttgaagtgttggaggtagaataagagtcattccagagtggcagtgtctaatgaggggaggcttcttgaagaaggatgttgggaggcaggccttgcaggggctggggaaagaccgtgggtggaagccaggtagccttgctggtaatctgacagttctggaccaggtctgtggtgcccccttgcctcctgccaccttttccctgacccaacacgtccaccagcgagctgggccttgcctgccagctcccctctggaagacgtcttgttggaaggcaggccctgtctgctcattagcacgggcagcctttccctgaaaccttctgcaggggccaagcctggctccttccacggagcgggaggccctggctccgtctgctaatcgtctgctgtctccatcccgagcattattttattttcgtattattctttttccagctaatatcctggcatttccaaagacaccgggtttcataatcttcctggcgttcccagggagctgggaagcagagcacaaagccgctattatagcgcgttccatccagcctccctctccaccccacaccccctgtggccacagcagccaccaccgccgcctcccacccagtcaccccctcctgacgccaccggcctctctgggaactctggtgacggctgccgggatgagctcacagaatccatcctgttgcccttgccctgggcctgccctccatgatcgaggatttttccaagccctgcctctgtgcttggcttgagtgttgggaaaggttctctgagatgcctgggcctggcagggaggggagggacagaaacgtcggcaacgtgtgctcagagtcttggagatttttgctgctggaagaaactttcattttctaaaggcgtgcctgatctgccttgggagctgtaggagcatcttgatattggatggaaagttgtgcatgtgtacgcacgcatgtatgatctggtgtaagggccatggttttatccaatgctccaggggatccaggaccccatagaggataagaattattaatattcactttaccacgtgctaaaaaccaggctttatatgcgtcatctcatagtgaccccagaaggctggattctattattagccccattttacagttggggagactgaggctctagagctgcactctcccacacagtagccactagccgtgggtggctacttaagtttacagttaaagtaatcagaataagaaaatttgattccccaatcagacaggccacatttccagtgctcagtagccacacctgccgagtggccagctaccacattgggcagtgcagccattgacggtttgatcattgcaggaaggtctgctggacagtgctgctctggaatgactccgagccctaatgtcaccttggaagaggcctgagtggggatgtccagcagcacagcacgagtcagtgcttaaccaaggtccaggcagtggctcttctgcccctctctccaggtgtcccctgaccagcagccaaaccccatctggcgctttcattcccccacttctatgagggcatcatgtctctcctgctccatggagtccctttgtggtggggtcccagggtgggaggattggatgctgctggctagaggcctctgccctgggcaggcttctcctcacctgatagccaggcagcttggcagtcctggggcagtcgggcagctagagaggagctggccccccggccccaaccctgggaaacctccagagggttggtggaggccagcatcccgactgcagtagagaggaccctcagagacaggcagctcaagcctgggccggcgaggcaaggccagttgggagtcagaagtgcagggatgtgggtcagggaaaggctggttccagagaggagtaatttgggtcttgagctggctgaaaaggaggtcagatgtggatggggagggaggggcggctctgcgcctgaaggaagccatgctgtgggcaggggacccaggcttggttcccagagctggcactgtgagcaagggcaggccctgggaggtgcgaggggtttacctcattaggaaacaagacctatggctggggctggggctggggtgttgaaaggcagctctgtggatctctggactctgtttcttgaatattcacgttgagcacctgttctatacctggcattgtgctagcatgggcggcttgagggctggatctcctctcaagcagaggcctcgctgctcttcctactgcccctcagtaggggacaatttgggtaactctaaatgcgtggaccctgcatctgtctcgctcaagatttgaaccccaaggtctggaggattcgattgcgtgtccatgtgcctcaggcaaaatgccagcgcccagattcatggctgcagaggagtgtgttacagttgggcacatgtgttgagtatcacccatgtgggtcattgtacatgcatgagggtcttcatctgtcattgctagagtgaccatataatttactgtccagtctggaacactattaataatcacactggaaaagcaggcgtaagtaggaccattccaggcaaactgggccatagagttgtcctaattaccaaggcaccctggcgtgggatgaaacctgctccagtgttctctgcaacatccgcatgtggagacatggaaaccctagagggacaagcacacacgcatacacgctcgcgccagcccacacgtggcatcgtggattctccaggtttcctgattccaccctcagctccccaggggccagccagtagttttgcaaggagtttagcagctgcttccaagccctggctccagctgtaaattaaatggggttgcactctcgcctgctattccacttaaggttgcaatcagccctgattagaaagggagtctgtgtgttcctgtgttccgttctgtcttttaaagggttcccctcctttggcctgggctcctggcctgtgtggggtttccctgcaagctgaggctggagcagccagggaaatgaagtgggccctgggttccccacagccctgacttggcattcaaccatctgtagctccagaactttgctcaggtgctttgagctctgatggggtagtaggagcctgggaagagccttgagagtgggcaggaggaccccaggttctgccagctaatttgctgtgtagccccagggaagaccttaacctctctgggccccagttttcttgcttatcaggtgggaatgctaaaaacacaacaaaaataataacctcttcttatggagcaggggtcagcaaactatgccccacaggccaaatctggccctctgcctgcttttgtaaataaggctttattggccggtggctcacacctgtaatcccagcactttgggaggccaaggcaggcagatcacctgaggtcaggagtttgagatcagcctggccaatatggtgaaaccccatctctgctaaaaatacaaaaattattcaggaggctgagacaggagaattgcttgaacctgggaggcagaggttgcggtgaactgtgatcgtgccattgcactccagcttgggagacagaaggagactccgtctcaaaaaaaaaaaaaaaaaaaaaaaaaaaggctttattggcacatagctggtactcattcacctatgtagtgcctgtggctgcttttttgttacaacagcagccgaacagttgcagcagagaccctatggcccacgaagtcaaaagtagttagcacttggccctttatagacaaggtctgtcaacctctgttctagggcatgtaccgtgggccagccattgccttctgccctgtccacatagtatctcatttaacccttccagcagttctaggagatagggtctgtcagcactcccattccattttacacttaagcaaactgaggtaaccgagaagccaagtagtaattgtttagctgtgtttcctcccatgaatattgtgaaaaattttatggataatggttgggttgtgcagggtttgtagtagtgtacactacatcatcatgttggcatttggatgtcccagcaaagcctatagtgaagagagtgaagatggtgaagacctggaagatcaccctagaactgtgctggtcaatgtttaacaaccaggtctccagaacaaaacaaaacaaaacaatccccagccctggtttgtagcatttgctgatttccatggtgtagctgttcctgccatgaccaatttcaagctagcaatgtggcaccactgaacacagagctgggaagagacgggcagtagcacactgatacataatatttccatcacagatacatgagatggaagcagcctcaggagcagagataacgggaaaaggtagtacaaaaattagaatgggccaggcgtggtggctcatgcctgtaatctcagcactttgggaggctgaggtgggaggattgcttgaacccagggaggttaaggctgcagtgagctgtgattgcgccactgcactccagcttgggtgacagagcaagactccatctcaaaaaaaaaaaaaaaaaaaaaaaaaagagaaattagaatgatttcaagtatttaccaccttgagtttttaaatatagtttctttagtggtaaatgtatatgatttaatttttactaatggctgtgtttaacaactggcttgcagaattcctgaaaatataatctgctctcgtgaaccacatgcgctcactccagcacctgctgctctgaggggccccctgaccccttttacataagagatgggggatggcccccaacagtagtgccccttccaacagccctgccacaggtgctcttcaggcccatcctgtgtaggagttgagtcctccccataaagtgaaggagggtagccagcctccagctggtccacacccatctgcttgactctgctggagcagggaaggtctctgtggcctccctggtggcccctgagatgtttcctttctggccactgtggggctttcccctgcctgctcagccccaggaagcctcactgcttagcctgtgacttgttgctgtgtccacccctgctctggcccttctgtcaccttactgtctccactttatagatcctgagccagaactctaggccctgtttagaccaaggcaccattgcaaacagagggtctgcagacagagggcacagacaccccgtggtgcagaaggaatctcagacatgctggtgggctcgatcttggtactgatctgatttaggtgggttgaggagtcccctttgtaggctgtgtttccccagaacctgactatctcctcctggctgtggtccttggatattagtccttggcagactcaggtgagtttggccattggctctggggacccctgggggagccctgtggctctgggaggcagagagttcctcatattcctatgctcaggctcctccagggagccgtggcttccagccgggcagcagcgggttggaggccacccagttccctggacaagcagcaagatcccttacacagctagcccaagatggagtgcgtggccacagaccgtgtggctgccagccccagcctgggagttgcggtggcatgagctatcaaggcaggaatgtgactgtgggaaacccaatgccctgggcctggccctggggctgggcaagagtgtgtgtgtgtgtgtgtgaatgggggtgaagggtgggtgggcagaaaccagggcatcagcctctcctgcagcttggctctgcacggggctcagagtgggagcagaggcaaagcggccctccctgtcctggccttgtccacctggccaagcctttcctctaggctccagtgtgctgctgccgctctcccagttccagcaccctccttcccctcctccaggaagccttcctgaaggggcttccaaaggcctaccccattccatcccaccccacagatggcctcatcctggggtgtaagtgagtccacattaatccctttttccatagtaacatcagacccgactctgagcttcctgaaggtaggaggtgctgtctgatgcaccttgcctgtcctttgccctgggaccttaggcctgggtgctgcacatgtggcttagggcgagggaattctggtgattgactgcatgtgataaatcttcattggacgcccactacatgctcgatgttggactgggtgcaggggataaaggagtgtgtatgtcttgcctgcatacatggagggtagatgcaggggagaagctgggagaggctgggtaggggctgctgctgaaggctgggcagccaaggaggtgcccatacctcagagatgatgcagctaaggaagagcctgagttagctcatttgagaagacattccaaatggagaggacgacatccctgcataaaggccctgtggcagaggaaaggttatgaattcaagaaatttacagaaggccagaggagaggagtgttatttaacaagagcctagagagatgaaagagttaaaccaggtacctgccaaggaccgtggggtatcatttcattcagttttcactactagttctctacagggcacagtttccccgaacctggccacaggggacattgggcaatgtctggagacatttctagtgatcgtaactcagtggagatgctactggtatctaacaggtagaggccagggacgctgctaaacatcctacgacgcacaggacagcctcatagcaaagaatattccaggcccaattgccaaggttgaagagccgtgcattttccacagtagccctgtgtgggtgcttgtgaggctatgcgtgttagaatgcaattttcaacaggtcgggcagggatggcctctctgggcaggtgccactggccccgtgagcagcagtagccatttcacaacttgaatgggcaatgcctggcacagagtaggtgtttcgtaaatgggtggcacatcagaggagagactgacgggagggagatgcttccccaaagttcccagattgggttttcaagaggccttgttacttgctttgagagaaattccccaagcttgagccacgctgatgtccacacctgaaaaccagaatgtacttcaaaatcaagaaggcatgacattggcggatccccaccgggccggcctgtgtcatctgccctcctcaaggccgacacagttgtctttccctgaggcaggtgcccattgttcgtgagttcactcacttgttcaccaatgatgtgttgagcacctgctgcctgtgaggtgctctgctgggtgatgggtgcacgctgggcacctggctgggctctcagtgggacaagcagatgggtgctcgcaatgtaaagtggtgagtgcagtggctggggaaattcagggcgaagtgggagtgcccaggaggggtacctaacacatccttgcagggtgaccttgatgataagactgcacagaaacgtcaggggacacatggggcaagggcctgggggcaagaaaggagacctcagagtgttgcagctggtgtgagcaggtagggggtgtaggggtttgggggtctgtgggtttggtagtgtcctgactgccagagactcaatttagaggccacagcaggccaggagggaggggtggccttccctctgctcccagggtctaatggggatgtatggagagcccagtctcccctgggagggccagtggaccagaggatataaggatgttggccaggcgtgtgggtggaagtttgcccggattgtgaatcagggtggtacaaagagggactgagcttagtggcttccctcagcctggctctggggggtgtgtctcccctggtgccccagtaatacttcttcctaaaaatccccatctgtctccctgaggtagagggagaaggtcagcacttgggtggcagatggggtgagggtgggcagcaggcccctggaccaggtgtggtgtggctgggcccctcctctggagccaggtcaggttttggaacccaggcagtatgaggggcattctcagtgggagcgttggttcctccccctgcaggacagtcacttgcagggccagggactcagtgaggtccacatggaaatcccaaggagggagatgctgcttctgattgcaggcaggaggccctgcccttggacagagacccagaacgtgctgccagaacctcagacagaggccttgggagtggtgctgacaggggcccagtgaggggggccatctagaggaggtgcctggtgagtggggatgagcactggcagccatccgcgagcagggaggtccctgcaggcgctgggagggagagaggaaggatggggccctggagccggaggcgcctccctccctatgctcaccctagccccctacctgcgggtggggcacatgtgtgtggccggactgaggtagacggaccacagagtccatcccacctgcctgcagctgagtccaccccctatcctccctactcccactgctcccaccccttaccggtgccccagcagctagaggtgctgagatgcaggcatcacgcactgttgcacctgcgggctggccaagccctatttccagcgtcctaaccagctttccttagtgtccctgcctcccaagtctaagaggcctgctgggcctccaggtttgctttgcgtttggtgttgcacaccctgcagccaggggggtgttctgtggtcattcagggctgggcttggtgctccctccagtgggttgccagcgctgcagggccaggccaaacgcctctcctggcaggggcccagggcttccatacctgttcacgagggaggatttcaggcctttgggtccgtgagagagagcgagagagggggaaagaaactccatgtacaaaccaccactgcctggaggcactgggagaggctcttgctggtttgcttgattcttactgaaatgtccacttttacaccttggaatcattttcaacaaatatgagtgatgtgaacaccactcccagcacatgacaaactttatagtttatgacacgccccctccccaagccctgtgccttccctcgtaaggtcattgatagctaacatttcttgagcatttactgtgaaccaggaagtgtgctaagaactacatcttctgtatcttctttaataatcaaagcaactctctaaaatagatactgtataattatcccaaatttataaagtgattgattcagagaagttaagccacttgcccaaagtcacacagccagtagtaaacagcagggccagaactggagcccgaggaatctggtttcagagcccatgttgaagttgtggccaaaggaagaggagagtccaggcatctccctgtcagaaatgaggatgtcctgtggtggaagtcagagcccacccagggatagcaggaccttggagagtcccctgggagaatagagggactcagcctttcccaagtgtgtgttttgcaggccctttgcagcaagggagcagaggaagacccagcctaccttaggatgcaattcctttttgacccagagtgaccagggcaggctttgcttaggtgtcctaagatgatctgaagacggggaggcctgggatggttgacggcacctctggctgtggaacagcataagcttgctatgggagtgagtgtgtctgggacagctttaaggagcgtggtttgcctgaagccaagggccgggtttgggggaagaaagccttggtgtcggatggggaaagatagggcgggtcactgggggtctgaatgggagaaggctggactggacctttcaggccaccgaaggattcaggccgaggagctgcatagtgaccgagggtgatgaagctggttttggcttggggatggctggccagaggtgggagaacaggtgtctagggaggcttcttggacaaggggctctgggactgagtcttgagggtgggcatggtttggagagcaggggcacagtagtggcagtggtgtcttgtgttggaggcactggggggctttgtagcttcagagcctggggagaggttgaaattcttgggaaatggttccagggtgaaggtcagggtggcccagcagaagaatcctgggaactggccactctgggtgggatgaatgggccgtctgaggaagaggccagggttttctttcaagggtgtgtacacgtttgtgagatgtgggactgaacaaggaagtggagtagagaccgttttattacttaaccccacccctctgaaatggagcaggcgacagtttgggtagtgggcaggagggagaggagagaggcacatggagaaatttgagtgagtgcagagggagcagacagcacggggtgtctagtaacggccaccgactctccccagtccctctgtaggctgtggcttgggcttctggccctgggctgaggaagtgcatcggagagctgggtgtctggcccagggaagtggtccagtcttggtgctccccaaagtggtttgtggctcagtggttggagcccagtgctaatgagggcgaggtggcagggctgaccatctagctttatacacagtaaacagacagcttggcttccgagcctgactgtccacccactcctgtccccacctctgtcctcagcctgagccttgctcaccctcagcagagtgggaactggtgagagatggtgggtgtgtggtgcagcttcctccagagcttgggacccagctcgatgttagcagggggtggcagagatggggacccagagatgctagcctggaacctccacatttcgattccactggacttgtccctagtgggcagatccccatttgattctcccctggagagccccttcgggtcattccttctaatctctttgcctggaacaactaaaaattccgttctgactcatctggtcttcactagagagggagaagaatttcctacagtcctttggtgctttgacattggagtctggtgattttttaggagaggttgagctccccagaatgaaattagaggctgagagttcagctttcggcagcggagagatctcctggccctggggatctaactctctgggctagtctccctgccacccccaggcctgggggcagaatctgccataaccagcttcgtgtctccagggcggcgtgatggatgacaagagtgaagattccatgtccgtctccaccttgagcttcggtgtgaacagacccacgatttcctgcatattcgactgtaagtgaggcttcgaggcctctatggggtgataagggtgtgtcaccttatgcttctgtttggatggagttatacgatcagatgtgtatgtggggctctggggagctgagtctctgtgctttttggtgggtcagtgctgtgtgtatgtgtgtgtgtgtgcgcgcgtgcgtgcacgtgtccgtgcctatctgtgtggtgtgtccacccactcaaatctgagatcaggcatttaaggccctgcgctctgtggctgtcccattgtctatttggcctcccctcctcccctcttcctctatctcttctccccagccctaggctggcccaaggacatgttaattagtcaggtgtccgctttcaagctgtggtctgttctcctgacctcgcacagtggcctgtgtggtttccctcattcagcccctctgtctgctgccctttctagggacagactccacctccccccgagccccagctcttaaccactccagccactcactctggcacctctgttttttcccttggtgaagatgggaaccgctaccatctacgctgctacatgtaccaggcccgggacctggctgcgatggacaaggactctttttctggtaggtgggagagaggcaggagagtcagagactgtgggctgagatctgggaatggagacatctggctttcgggcaacaaggggtgctgtttgctgggtgcatggagatgggtgctgtcaccagggtcctgtggcttcttggtcgtcaggtgcagcaaactcttgtccatggcctgctggtcttcttggtaggatcaggcttcgctgactgtcccctctttcctgaaagccccttggccttggctctagccgccagtctctggagggtccctgcagcctcctccctgacctgctcctccttgatgcttcattgccctataagcctgatgctccaagaagtcttgtctgtgtcctctctctgggcaccggggtcccccaacttctccaccttcactcacctcagttcatcctgtgcaaacctccatgtgaccttgctccccagctccccccacccagatccaggctgcctctgcatttcctgccatggccctggggttggcagccatctgttacccaggctggaaattctcagtcacccagtcctgaggattctacctcctgaatccctctcagatctgttccctcctctttaatgtcacactgccatctgacactggccttgcccctttgtatctaggtcattctggttatcttctgatctccctggcaccttccacactgccccagacacacctggtcacatccctcccctgatttcaagtatagacactgacagataacctccaactcagcacagcagacaagtcccttgtgatgtaaccctgtggtcctcacctggttcaccttttgctcattgccctctatccagtagctccagccccaccaactctgtccacgttgcccatgtctggcctttgcactcagtgcgctctctgtctagaacacatttgctccctatttctaaccagcaaactcctagttatccttcaagacccagcccagatgccctctgacttccccaagccaagctgtttgctccttccctcagcacttggccagtgccttaccagcacctccctcagaggccttcccctctgcacagatcaacagtggtctatctctgccatctccttcctgctctgaccatgagctcccccaggaaatggtctcgtcttactttgaacctgcagcacttgatggctaaagaacaaacacttgctgagtgctcactatgtgcccaggcgttttgctgacactatttcatgtaacccttacaattgccctgtgaagtaggtggtcaacatccccattttataggtgaagagacagatactcggataggttaactaaatgcttgcattaaaatagctaccaagtgacagagcttggaagggaacccaaggctatcactgtctgagtgcctgctgtttggttgagtagaactgagttccatgggagtgacttcctggtcacagcagggctctgcagctgatggccatctgccggcttccttgctggtccactctcctccgcgatgtggggtccagtctgtgtccttctctccagcagctgtggccctcagtggcccatcctccagctctgtgcagccaggtgcggggtggatgaggaagttctaccccgttttgctttggggccagggtcctgagagctccctctgcaagtgtatatagcagcaacccgccagaatttacaggcccaggccagacaggcatctgcagtggctaacttgtcctgggaaacttgtccaggagtctgacgattagaacttactctgagaaaaaggacatggacgagtttatagccttgcttcctctcccttcccggaagggcgtgagaggtgagggtgccgggagcgggtttgtgagagggggatggccagggggggcccaggcagaagcccccttgtcctctgtgggccctgcgggccgagcaccctgcagagaggggagggaactcctccaagggcccagcactgggagcctatgctcccctctggagacggcattggtagggcagtggcactggtctgcggagacgtcacactttccatcctggccccaccccctcccccaaataaacatcccttgagctttgagggcactgcccagggcttcctcagaggccactggcttctgaatgaaaggcccgattgagcagctgctggaaaggaaaacagcagccaacatgggtgaacctataaaacccagagtgtttattttcactcccaaaccctaaaccaaagcaatttctcccctggaactgaccctggggcggctggcggccggaggctgtgcatggccaccggctggcatttctctgaggaaactcatgtgtgaatccggaatgtctggggccaggggagggcctggcacagtgtctgtcactggtgcagcttccagctgcctgccgggtgtctggggcagagagggccctccttgaaccactctcccagtgcctctgacctgtggctctctgggcctttccccgggggctcctacagccctctgctgtgctctttgcttctctctatatggtgggtctcggggctgcccggacattggggccatggctgctccttctccctggtcgaatatttgaggagataggcaggggttgcccagaaaacacttgttgaataatattgaacttgggagagggaggctgtcctagagatattgccatccagacggcctgagggttgcaccttaggtggggtttgagtgtatggctgggatatcaattctctggaccagtggaagggcatctgtggtatgtgcttgtgtgtttattaatgtgtgtgccctgtgcagcaattagtcataaaaaacataaagtgatacttaattcagtgacttcttttttttttttttttttttttttgagacagagtttcgctcttgttgcctaggctggagtgcaatggcgctatcttggctcactgcaacctccgcctcccaggttcaagtgattctccagcctcagcctcccaagtagctaggattacaggcacccaccaccatgcccagctaattttttgtattagtagagatgagatttccccttgttggccaggctggtcttgaactcctgacctcaggcgattcacccgccttggcctcccggagtgctgggattacaggcgtgagccactgtgcccggccagttcaatgacttctttttgttgttggggtggggttcccactgctttgtgaacatctgttgtatgtactgggtttgctttgaaatgaaaggctatgacttgagaggacttagaacacgtcaccaacaccacacctagctccgtcctgcccacccctttggtgtggagtgggtagcattgcttccctgaacggtagcctgagctgagttactcttcattgtagattggtgtttctcacagggaaccagggaagaaggtgtcaatttggccccctctgccagctaagaactgctgttgtggttggagggatcataagctctgcttgtagagctgcccgcccagatggaggaccctcaggcagctctatcatgaggtcaccacgttccattccaagggatgaccctcagcttaggaggggcccagaaatccctctttgaggccctcccaggtcactgggctcaggcggtccaacttggctaactgagccaatgagagatggctgatagaccagatgccacgtcatttattaatttacaggggtgagtacctctcaagaaagtagaaggtcctgtgccctctttgctggccttacagctccaggtaaggtcacagtggtgggccaggtaggtgatcctatgggatggtcctgccagaccaggctgcagtgaggtttgatgagccggagctgcccacagctggggccacgtcttgatgaccggtgccttagtttccctcagattcagactcagtcctgggtggtgctggggatttcttgcttttgggtttcccaagtctgaactccagtcttccttcccaacccctttttaagcacagctttttgttaaggttggctctggctggggcaatccaccagacgagcttaaggaggtgttttccaaagtgcattggaggcttgtgaaatgctccacttaaaaagggttcctgagtaagagagactgggaaacactgcacgcttcgggatttacaatgcacagtggcatatgagaggctctgaggcggctgcagggagggagcctgtttaatctgtttaagcactcattagctccccagaaaacccaccactcaaagaacacattttgggaaacactgatctacaggattccgtccaaattgctcagcaggaatccaggaccatttgtgatctgcccctcctcccctcctgcctccactgtccccactgccctggtgctcccttcatcccctcagccagaccaatggcttgctgatccccaagtgcctaaagtctttggtgtgtttacccttgccatgcttgcgcctggaatgcccccttttccttggtctgcacggcctacctcctcatccttgaggcctgctttgggaagcctgacttggtgccagcaggcgacatcaggtgctcctcacccctgcccctgtatactccactattaagtagcacatcaccttgtattatacctgtttaggttacaatttccaaccagtagtcacactcttaagagcctggattatgtctcattcatcttcctattcctagcactgtgctaacctcccacaggatagccaatcaataattgtatagtgaatgatgcatacaaataacgcaagagtgaacgtctttgtacatacatctagctttttggtgaatctggatgactcccaggaatatgggaaaagggtataaatggttttatgtttttcagggcatagtgcccaattgcttttctgaagggttgctgaattgcttccagcaataaaggagagtacctatttcatcaactctttgcccatactggctttttataattttgaacaatttttcttaattttataggaaaaatattgctggagtctagttttaatttgcgttgccttgattattggcaggcgatcccaccctctctgaagggccctttcctatgaggtggcatggtggaaggagcactggactaggagtcagggggtctagtacatacgatcatggccgagcgacttggtcttcctggggaaagctcccttttaggaaaactggggtgatacttcccactctgtccccgaccctggtggtctgagtggttggtgggaaggccgaggaggaaagcttagtgtattgtgaacgcagaaggtcctccccggagctccaggaaggttggagcagcagggctcagcccgaacagcctggtgcagggctctggatccagctaaggaatcgtctgcctgaggcctggtgataggtccctgactcccttgtggtgatgcagtgaggtagaatccttgtgtgctcatggctggatcctccctggggcagccgtggtcctcagagctgcaatccaaagtgcttgcctcagctagggcacgatgtgcgctgcatatggcttgtgggtgtggccctggggagagccctatgctgtgatgcacacgcaaaacccagcccctcaccttcccctccaccgctttttgggaatctgcctctccctcctcttagctttcctggaagagggatttgtctgtgagtgtgtctggctgtccttcatctgaccaccttgctctagcaacacccctactcccctttttcctttttttttttttttttgaggagtggggtcccgtgcagggagaggccaggcccctgcacacagtagcccagtgtctgaggccccaggcctccaggcctgctctttacaatgcctttgttgtgtgttttttcctcccatgggcgggtggggcacgtgtgtaggtctgggtgatttttgtttgaaagccaccccctccccgttctccccccagcgctgagctcattgcctgggctgatggggctgctggaaggagtcagcctgctcgggggccagcgtggggggtgctgccaacaccaatacagcgtgcacagccgctacaatgtgcaattgtgatctttgtgtaaacgcggtcggtctggggcccgcatgcttataaaaataaagcgtagggaagcacggggcggggcgggaacaaaaggggctttttcgctggctctctaatatggttttatttatcggaatgcgccctcctttccttactggaacctggagaggttctctgccgagcttggagctgatggtatcacagccagacggtttcattaaatgcacagatgcctctgggccctgccaggggcaggacggaaagggctcagggccggccctgccaggtccagtgcatggaaaggagagccccatgccagagaggctcccaccaggtaggggtgggcagttctctctggctccttcccctgccaagggcctcccattgccctcttctgttccacagaatcaggctcaaaaccattttcctgcaggaagtcctccatgatttgtgcctgatggctgtcaggctgatcccaggctggtggctgccttctattaaccagacccagcattgctcagccagtgggtggccatggctgagtccgccccttaacttagatacctcctgctcttaaaatcagctctttgggcaacaggtacaaccttggatcctgctctctccatcccttgatgggtttcctgccattgcccaccccaaccttcccacctctttcctggtcactccttgccagcccctttctctgccacctgtgcagtggccatggtgtcccatttggtcttcttgtggccagggagcctgtcttgctcttctcccctttgtgcggaagccctgtctccccatcccagcccctgggttgtgtttgaacctgcatccttctgaggccagcgacacagaggccattacctctgaggccactgaggccctcttgaggtcacaaggggagtgaatggcagtgctagggctggactgtggggctcagagggcacaggccattgcaggatggagtagggtgccaagggtattgagtgcatggttaggcactgggttcagccctcaaggtgacatcccattaggagaagctgaagggagtccccttctccaagccctgtgttcctctcccaagttatatgcactcagaccctctcctgcattggtttccaaaatgtggtcccagaaggcagcatgagcatcacttttaggaacttgttagaaatgcacattctccagcccaccccggccctgctgaatccgagtctctgggggcagcacccagcagcctgaatgaaccttccagatgatcctgcagcatgctcacattttcagaaccactgccctagagtctgctctagtgacaccaacttgcctttgggacaaggtagagggaatgagttgtggctgggtcccagggtggcgtggccaaggctggcaggctggaaaggagtttgggggtagcagggagctgcaggggcctttgggtttctcgcacacccctactgctaaatagctgctgagtctgtgcacttccctttagcaccccacacccatctaagccaccattattcctccctggaccactgcagtgacctcagaactggtctccctagacctcatgctccctccagtctgttctccatgtggcagccagagtgagcttgctgaaacgcagacctagccacgtcagtctggtggcatcccagagctcacagacaccagcagctctgctctgcttccccttcctcaaggaagccagatccctccctaacacatttcactgcattttatgtctattcttcaaggctctgacccaaattgtaattttacgttagcttgtgtggatattttatatttagttcaaattgtattctcagcccctagcacctagcacctagcctggcataaagaaggcactcaatacatgcttgctggatgaatgaatgaatagatgaatataccatacaggcactcacttcccccagctggaccctgcttccagcagccacagctcaggaagcggcagaaaaggggatgctctctggatcttgtgcccatttgccaggacccaggctccatgtccccaccgtggcctccagctggcctcatggtggggctaggagagccccatagggaagatgcatcccagcatgaatgttgttgctccagagtggcagccacaaccctgctccagctttgtggccccacatggctctggagaagacatctctcagggtccctgctgtgtcctgtctcccctccccctctccggcccatgcagatccctatgccatcgtctccttcctgcaccagagccagaagacggtggtggtgaagaacacccttaaccccacctgggaccagacgctcatcttctacgagatcgagatctttggcgagccggccacagttgctgagcaaccgcccagcattgtggtggagctgtacgaccatgacacttatgtgagtctgcccagctcctgcctcgtcccctcacagggagggaccatgtgcaaaggtggggtctccagggactcgtggctgcccagccagatgggtgctctcctaactccacgggccctagaacaattaaaataattttagagtcattaaaaatggattgctagcacagatgccgttcccacagcagacattgctcatcagtggaagggaacatatccggaaaaggcgcttggttgtgggtcaggggcttgggttttctctgcctctgcctcgcctgtgtgatcccaggccagtcccttcttctcatcgaggagctgcgtggaatccttaaatgtacatcaaacacttacgttactggctgagtggcccttcacttggggttccttgtttaggtgggagcccagacacccacacagtggagaatcctccatgtgagagcacgggtccccgagtgcctctcaactctgtgccacaggcagggcctcttaccacaactgtcccacaggacctcctgtggtgacaggcgagctctagggctgtgctgtccaaaaagggagcctctagctgcacgaggctgcccagcactggaaatgggactggtgcagctgagaaatgaaattgtaaattttatttcattttaacgaagtaaaattaaaatttaaatagctgcaggtggctggtgctcctgtattggacagagcagctctaggaggctcccaggagggagagagtgctatgggctggaatgtcaggaaagcctttgggaaagacccaggccctggaggaaatgtggggttggggtgtcagtgcgaggcagaggcctggaaggaggagaagggagtatgaggccaggggagcaggagagtgctgacgtcagggcagcattttccgaagaggaggctggatgctgccggaagagatccactgggcgcaaggtaaagaggcccggcctgcgctggaggtggcggtgggatgaaaggggaggggctgggtttggaagacattgtcagtaagagttgccctgaccagacatcaggttccctgggtgggtgtggtgaacaggggtgggggaaggtgctgctgtctatatgcctcaccagatggcaggggcagctggccatgggtaagctggcctgggctggggatgcaacgttggggtgcttggaaggaaaagctggtaccatgggaaggaatgagcaactggaggaagagtccatgtgggactgtttggagaagggcacaggccctggcaccttcggagcaggagggaggcaggcggcagggctggcacttctcggggggactcggcaggactgagtgcaagtgcagaacagggcgggagggcagcggtatgagctgcaggctgccagagccctgagggggcttgcccctgcatccagtgtgacagatctgtcttctgggcggcagggagttaaggaaagtgcctgaagaaaaggcacctgccttgatgaaaacatcattttgtccaggctcatttaatttgatgaacgtgatcacagtttccccatttgcaaagtgggtgggaatttaagggtgaaatgagcaggagatacagaagtccctggaactgcaaaaacctgtactgctgagcgcattagagaaatgccaggaggccgtctctctggtctccaatagtcttagcgctgattaaattgtagcagggcaaacactagttggacagtgttgaactgtccagagggacttcccgaccatgatgggaattcaaacctagtgacagtcaccacaggctgctcacagcttgttttgtccttgagtcctgctaaggagagcagaattcaccattctgtgggagggggtgcccttactactgaggccctttctagttcagaaggcacatgtagacctgatctctctgaggctccctagagccctgggtaagggatgctgattcttgtctctctacgcttggtctagggtgcagacgagtttatgggtcgctgcatctgtcaaccgagtctggaacggatgccacggctggcctggttcccactgacgaggggcagccagccgtcgggggagctgctggcctcttttgagctcatccagagagagaaggtgaggctggtctatatccagatccaggaggcccaggcaggagtggggtgggggccaaccctctgtgggagcctggaacacctcctctgaagccaggcctcctgctgagacccattttctgaaccctaagtcaggacaccatctaacatcggaatagaatttggggatcaggaatgtctgagtcctctggtcactggatttaatcttccttgggtcatctcctgacgtggtttctgggaggaggacctctgtggtctgattaagggagccttaattgccacaatgtgagggactccagggacaggcaagggcaggatccccgttgcattgctggcttcaccatgacctagcctcatggccctgggccagccactcccctgctgtaaaatgagaggtttgggttggacctgtaccttcaaacttcctcttagtatgatgtgaacccgaataagtagactgaataggagtagggctgctctgggtgaagtgtctggaggaatgggcacagtgccagcctagcatcccttctaccctcaaggaatagaggctgcaaaccatggactgtctgatcactgacatagtccatgagtgtcatgagggtgatgggggccttaggtgacaagcacatgaccagagctctcttttcttcactccagccggccatccaccatattcctggttttgaggtaagtcttgctctgacctttccttcttcaaactgattgccagtctccctgtgtttggcatctctctgggttaggaagggtggccaggcattaccgcgatcctgcctcaagcccccggggaagctctttcaagcagaggagggcccgggctggagggagctcaaagtctctgccaagctcaggcctttgctgcccttctctgcgaagtccaagaaccacagaatcccagatggaaggatcctcataattgtccagcccagtggctttcagctggctgagcattagaatctccgggacagcactgcccagggaatcttaatgcacatccaggactgagaatcactgacttagccccagggttctgaaagtgtggcccattcttgagtcctacttcaagcccactgaagcaattctgagggcagcccagcaacctctgtatcaacttgccctccagggccttctcacacatgcacgagtttcagaagccctgattcagaccacatttcccactgaattgttcttaccaagacctcattttctttcctcttcctggacgggggcttcattcccttactgctgctctccttccttcttctggaggtcttggtagaaaatgttgagctttgactggtacccaggtgcactggatgcattacctgattacatgccaagttcagctgcatctatgagaagtagtcatctgggctgtgtttggacacctccattgtccttcacaaggcagcccacacaatttttagagagttcttgggaggccctcccttcatgcaagccctccttcaccagccctgcccctccagctctccctccctgtcctaagctcctgctctcagtgctgcccgctcctgggggttctaggttggttctcctcagcttgccaaggccacaggctcccaagcccttcccatcacctgctgctcttctctttccttttgttgcttccagagattcctggcgtccaggcttatgctttagcctttcccagcgtccctctgcactgacatccatcacaccttctttcccagggaccactttaggggcgtggctgggaagtgcatcattcttacccttggtgggaggtggtttctgttggctcctcttagtggtggcatctggcatgctgacctctggccccgcctagtgcgccttgatactaatagagaactttttccccttccaacccctctcaccatctcctggatgtgccacatcccatggctgtgggccaggtgcaggagacatcaaggatcctggatgaggtgagctgggcgtggtggttgggatgggtgggccgaggtagagggaaggtgaagccagccttcaagcacacacctggagccttccaggttcctggtgcccagcaggcatctgtcacatggagacctgtctggattttattccccatgctgtgtgtggattcagggctgcccagagtgtgtcctgggggtgatcctggtctaagaaggcttgctgtcctgctaggaggccagatttcacccagacaacatgaatagcaatacagattcttaaatgattaagtaccaggtggcacattttgaagaataaattgtttggaaggggccagagtagtcaaggaagcctttctggtggaggtggcattagtcaaatgtctttatgcccatcagcacttaggaagaaagtgagaaacatggctttggctcaaaaggccaaggaccagtttgggtcctggctggtttgggggatggggcgagctggggacctcctagggacgggaagaagtttagagtttgcatttagataaagcaaggctgcatcctttgccatgggaggagagatgcacgttccctatggcctcctgtgcatctgtgggtggattgtcgtgagccaggccagagggtgggtggcagagacctgggtggagagacaggaaggagagccctggtcagatgaggcgttgggaaaagggcagccacttcctgccattagggaatccccagaccgacagcggacactatttgacattttcagtgtaatttggacttgaagtgcagagtcaggatgtgggatccacaggccccgcaccccttacctcacttccttttgctcccagaccgaggtggggtccgccaagtgagctcgctgtaattgcgcctgacaggcggcctcctgcttctggctgcagttgcaaaagactgccgatttggaaagggaggtggagtcctgtccagggaagcagcacggagccctctctgttgattgagtgcactttgtggccaaaacccacagcctgctctgaagaagacccagcccagggatgagttattaaaaaaaaagttaaaatccttaataactggattcgtaatatgtaacagtgaaggctcagattccgagggcagggatctggctgcagtctcgtcagaaagcaaatcaaaactgcagctcatgggccagagcccgaagagcaccgagtgccccctgcagggccaagcaggctgcaggctgagggtgggtgtgggtcagcagggccaggggagagcaagtcctaggagtgtgctaggcacagggctgggccaggccagcaggttcaaagggtccaaggaggacctatcccagtgggatgaatgatctgctggtccagggaccagccccagaagatgaccttgtgacctccctcagtcccaggggatagccctgggacccctagctcagcccatgtccttctcacttgaaggctaagcctgatgccaagatgctgagtcctcttcgctttaagaagccccagggctgggtggtccttctgttgccactggtcctcctgtaagtaggaccgcagcagggtgtttctgtcttctttgctgtgaccaagctcctgccttgtatctcccatctggctgctcccaggctcctggcccgatccctgtgaagagtgctcaagcctttctggagggctgggagcctcctcctgagcccctggccatgggagcccatgagagtcagggggcagtgagggaagatgggtgtgttggggagctgtctggctgcaggaggtgtgggtttgagagactagctaggaggctcttgagccagttgagataggggcctggactggagacaggccagtaggaacggatggggcaagtgactctgaaggatggtttaaggatatcctctcttgtgggaagtgcctttcagctagcgcagccaggtgcagagatttccaagccacagtgcctgtgaatgagatgaaatactgtctgcccttgtcgaaggctcccagagcaggacagtgagggtaacttcctggaagaggtgccactgagctagcttttgaagttgggattggtagaaaatgtggggaggtggcccaggcagcagtgtcttgggctgggggcatgtcacctcctggatgtggcctgttggacaacaaacttcccctctcccaggctttatgcccatctgggacacctctctctgcagctcttggtcaggaagtgaggctgttgcatggtgtgtctgaggctttgatgatgtccgggagatctgggtcctcgcagacagagcagatggagggaagggtttccttttcgctctccggtctgcattttctttgtctttccctctcttcctgagtctcttcccactctcctttcgtgtttcactcttcctgtttgctccttggccccagcttcctccttctccccgcctcttctgagccctctgtctggtttcttttcctttttgtctggagaacaaaggcagtccttgctgccaaggggaatgagttcaaagaaactgcaattttagatttcctgagaactggagaatgtgtgcatgcacgtgtgagcatgtgcgagtgtgtacactctcgagggcacacacatgcacgcacacacagcagctgaggtgatcgtgggtccctgaatgcccagggccccctaggatacagaacatgtgtagaagaagacccatggggcttgtgatcctgaccatttcggggaggtggggaggggagggggtgtggtttagagaattacccttgcttctgctgctgctctcctgctggggcaggggatgccctggtgggagggatcgtatgctttgtggctgattttactgccagttcaggggtgggggccaccagataccactccatccacccatccaggctgcagggtatatggcttttactctaagatgtacccggggtactctcctgtacccccaagtccactggaaggaaaaatttggtgttttgcaatcaggaaaataaagccagtggtcccccatcccccattcctcccccaaggccttaatttaaaacactgtttttcctgggaagtgtaattagagcaacatattgttcctaacgagctgggtggggcaggcagacaatggagccctcccagcctgcctggctgccccctgcctggagctccccgaggaaccaggatgtgactgcagcgtcttctgtcctctgctgggtgaggtgagggtccataggctactgatgacccggctgatgcaggaggcttgccaacacttcccttgccctgggagcgactcctgtctaacatggtggcccctagactgggctgggggtgcccctttcatggctcagggccttggttcttcgtggtaaactggccagcgggactgatagactgaagtgggcttgaggatggcttcagctctggtaggggagagagcttcacttgttcttggggtcttcttggtctgggctggcttgatcaacactctgcacacctgtagaacccatctctgcagccgcccctggtctgccctgcatttgaagggagcaagacgggagctggtcaaatgtggcttcctctgattaggcttatcagagtcctccatcaaccctaggacagtgaatcaggatgttctggtggcactttcagtctacaccccatctgcccagcagtgctgagaggcttcccagttgcagtgagggtcgcagcaccctcactgagaattactgtcctggagagggggtgctgtgcccctcaagtgggctggaccagaaaaaaagttgaaaaccaggctcaagagctggcagagacctcaggactcctgcctgggagatgatcagagatcccttaggaccataggaatggggtatgtggggaaagggtcatgtagacggggttaagagagtcagagtcaggttataagacgtttctggagcgtcttggggagattttctagagaccttgaattaggccctaaaaatgggttagattcagttggcagtaaagaaagcccattgaaccagagggagtaatgagcaggcctggggaggacccagggtcaggctagagcaggcacgggtgctaggaaggaggacagtgcgtgttggattcattcctttatcctcccatccacccactcttctgtcttcaccctccctcttccccttcagttatccattcataatcatttatttgttggacgggggaattcagctatggtccctgtgtacagaattgctggtttaaccaaggacacaatcaaatgaacacgtggagatagcatgggtgatggattgatgtgtctttctatgggaataagtgtaagttgctatgggagctacgggggtacttaagcttggggcaccaggaaagatttaaatggacacctgctgtctgaataggaagtacaggaggagtaggggtagaagtgcatttcagacagagggaccactgagctccaagcctcaaagctaaaagagcatggtgcctcctgcaacctgctagcattcagaagggcaggggttgcgtgtgtcccaggaggtggttcatcactacttggggtcatcaaggggaaatttatctcatgagagacatgcccagagaaggcagcaggagctggaagattagaggtcttgtggaggctactttgaagagtctgcacttcatcctgagcagatgggaagacattggaggacttgaaacaaagagtgacattattagaaagcctgccttggctgcagattgtagaacgcgtgggctgttgggagagggtgtcaaaaccaagtgaaagggggatgctggtgaatccaggcaagagagggtagtggcttgcactgagcaaaggagatgggtgggcgggcgtgagagatgttcaggagacaggattaccagtgtttggtgatcagtcaggcagggcgatgaggggcaggaggagccaagggtggcgtgggagcttttggcttggttgtctagatggtggggtcagacttgaagagagcaggttctgagggggaagatgaagaatccagttttggacaagttcagtgtgagaggccagtaggacacattaatgaactaagcagtaagatattggggcttagcagagatgtttgggagcagaaagtctaggagagggctaaggagcagatcagggcttggtggaggaagatgggaaggctgcagaggaggctcagcaaacagggtgagggccagcagtgtggatccagagagactgtttgggaaggagatgaggttagctggccagatgctgctgagggggtgagagagagaagagcccacgagtgtccttcgggtaggggactctggagacaaatttccggggaggggtgctgagggcagaagcagggtgcactgggaagcaggtggtgtggacatgagggaggagaggtagtggatggagacaggattagagagaggagaggagggagcctgcagagaggagggcgcgggtggatttgggagatggggatgtctttaaattgggaaggagcagatccaggagatagtgtgaaaaattggggaggagcatttggacgcatggtcagagggggagccacagaggcaggcaaccctgggaggtggcaggaaatggcagggaagaagcatgtcctgggacccctggggacagcacggtggacagagatggccttgggatgcatgctgtggcctcatgctgaggaagctgcctggacacacctctaaccactgtctctgcctgtctcttccttctgcctccgctgggcccgacgctccgcagctgtgtgctcctgccttcttcctccagggccttctccaaacggtattggagcttaaccttctccaggttcttgttcccctgtcctcagcaagcaggctcctgaagatgcggagcctggtccccagcctttagagaggaatgtcatcaccacggagctcgagggagccccgagggacagaccgaggaaatgagggataaagtggatactgcccagcgtttgggggcctagagaggaaatattctgggaggaatgtattcatgagttttccttagtgattttaagagaacaagtgtatgagaaagattggtctttctgccactccactcaggggatcctggggctgttccctccctgatggtttttttttttggcccctctttgtcttgggtttttggctctgggtccatattgggttgggcatagccataaggggccatgaacagaccacaagcaggcattcaagtgcaaccctgtctttaaagaggacaccctgctgtgctgccacctgcagctggtggccttggagtgcccagggaggacatcaaactgggggtccccatagcagccaggtcactgcagaagctgtgtaggccctgcctccatcctccaagggcacctttcatgtggactgtgacatgcatagcagcccctggagctgtgcactgcagcagccctgtccatcacccctgcttatcagacggtcaggaatgcaggtgcttcctgcatcatgtcacctgcattgtgggtctggaggaaaatgataagtttttttgctttatgccctggtgacttagagatagtaataaagccagtgttgctctgaaagatgcttctaatggctcagctctcttgaagtcaccctggggagatcaacaccaacaccaatggcaaaaacaatggtactaacaacaattctagtaatagttacagtcacagccatttactaagcgcctcctgtgtgccaggcgctcttcagatgtgttctctcatttaattctcggagcagcttatctcagatcttcatctgagaatactgagtcactgaagttgagtaatctgtccaaggcctaatggcgaggaggtggcagagctggaactagagttgaggtctgattctaggactaagcttccaactgctgtaggttgggggaaacatggtgtcatcagggtgtcgctgcacaggagtgtggcttgggttggctgtgaagtgattcatggaggtggggggaagctgatatctttctctgctttgactgctcccaccatctatggcagagcgtctgtatggatgtaccatcctcgcagaaggaacccaacagaagtcacttggagaatgaatccaatgatttcattgtttaataaatgagattacatgaggcaagctctgtaaagtgtctatcacagtccttttaattatagttaacatttccggagtgtcaggccctccatgtatggatgtgcaggttgggcactgcacaaggacactgtgtctaaggggctgcatttctagcacagacaccatatacttgtatttattataacaatttcccaataggtggcagtaaagtgtcttgttctaataaactcagaaaatatgacaactttctgacatggaagtaaagagtcttaagcacatttttctctaattgtcacaaagacaccacatgggctaatagtcctgttgaaggtttacatgaagctctaaaggttatacaggtattaacttcctcaaccctcaccctaacctttagaggttgacaacttttgctaaccattttatagatgaaaacattcagctataggaggtgaaataatttatttaacgtcatacatagtggagttaggactcacacctgtgttcctaactgctgttattggtggttaactatctaaggcagtacctgcctcccttgccccaccttgcttcctcatgtagttctttgtgatcattgaggattcctgcccaactctttctggcaaactcttagtaggccagaattgacacacacttgctcgtctctgtagtggagagagaccctccccagcagtgtgctttggtgctctggggagccccttctcccattgctcagttgttctctttctggctcacaatgcaagtattctgtcctcacaggggacaggcgtgagaggtgggggtttggggctggaaggtgtctaggggtggggaagaaataccaggacagatgataacccggaagggtctgagccaggaggcaggagaaccaggctggcgggcaggcacatggtcctctctgggactgagaggggctgaagtggatctgccaggatggaataggcagtgtgtgcacgcatatgctgtgtgcgtatcagggaggggcagacccggagcagctcagggggcatcagagcctgcattatgggaggaggggtgacgggattcagttggaacaaggtgacctgaaccctggatgaaggtgctggaattgtgatcctggagaagatgatgcctggccgaaactgacttagctttttcgtttctgcctccctgtttgtccacttctgtctttccttctctgtttctccctgcacttggcatttctttctgtcctatctgtccttctctcttgtctttttgccttggtcttccttccacctttgtctccattctacctgctgtccactgcagtctgaggacacagacctgccctacccaccaccccagagggaggccaacatctacatggttcctcagaacatcaagccagcgctccagcgtaccgccatcgaggtgagccgtccgggcctgggcgtgggggctgggagcagcctgcccttccccttcctggccccagcctttcctggggcccggggccttctgagccactctcctcattctgtgtgcttagatcctggcatggggcctgcggaacatgaagagttaccagctggccaacatctcctcccccagcctcgtggtagagtgtgggggccagacggtgcagtcctgtgtcatcaggaacctccggaagaaccccaactttgacatctgcaccctcttcatggaagtggtgagccccacctccctactgtccccttccagagtcctggggctagaagttctacatgtccccgagcagcctggggcttgtgctccaattccctgcgggatccagggtaggacccctcactttcctgtgaacatggggagaaatgctcataccctcctcactggaagggttcaggcctctgagtaggacaaacggggccaacctgctcctcctatacccaaatcctagatcagcgaaagtcccaaggagacatcccctggctgttgtccctctgggacaggtttcagtcccctggagcgcccttggggacctgctagggcttggctttccaggattcctccaaaccttttctgaccatgtcctcccccagcctgggccccctcaaaggagctcacccccacagccctcaggccctccaggcctctccacctccctgggatgcctagacctagtggccagagtaaggcaggtctgaggaaaagaaaatggtttgcaagatgaaagcgctgtagaaattccaggcccagtggctgtcaacagaagcctcctcttggccgagccaaagccgcccctgaaggagagcatataaattatttcaagttgtgttcaaagtgcttttggggtgtgtggggggaagaatctgggtctgtaagccaactcttgagtatccacttggggggactgtctgtaagaaatgttgagtcccgggccaactcccctcgcccgctccccagccagtgagggagcgcagcctcgtttccacttcaggctgaacaggatgcatttggaaggtaaagctgtggggggaaagccggcctctgcatgcagcattcaaggggccgacagaaaaggtgtgtggcttcgctcgactgcccagctctgggccagccaccattttggatttctggctgtggggattatctgcggtttatagtcattttctgctctttgggcttgacctggagacttcccagagggggattcaggccagtgcgttcttcctcctccacccagatgctgcccagggaggagctctactgcccccccatcaccgtcaaggtcatcgataaccgccagtttggccgccggcctgtggtgggccagtgtaccatccgctccctggagagcttcctgtgtgacccctactcggcggagagtccatccccacagggtggcccaggtaggggaaggggagatgatgggcaggtcagggaagggggagcctcagggccaagctacccttcctagttgagatgcatcctgaaacccttctcttacggagacctgaatgagaagtggtttctgctctgctagaccacagggtggagaccttccttagggcagagcctagctctgggtggggggcaccaggagcaggtgactgatacccgttggagctgaggggtgagggctcaaagtgggcccagggggagggagagagagggcagggagacaatgatgcggggagggaggaaagaaatgtgaggagaggaagacagaagtgggagacagagcatgtgaaggaggatgggagagatggagatgagagagggacttattgggaagtaggaagagagagataccgactgagaaatgtggagagactgcagggtcttgtcttggtcccttggttgagccctggggctggtgaggggcgagccttttgagagagcccctctcaggcctggatggctccctcccctgcagacgatgtgagcctactcagtcctggggaagacgtgctcatcgacattgatgacaaggagcccctcatccccatccaggtaggatgggcatcctccagggaggcctgggtcacctttcccctccattcctcatcaattcccaccccttctcccctacccttcattatcacacagcctctatacacatccccttctgggctctgcggttggacactgtccagtagagagacccagatgggagctttcagtctggctgaggggggtggggtgtgctcatctgggcaagactcaatcccttttcttggatgcatatgtgaaaaataggccatctaccctgggggccatggtgagggctttctcctggagatcaccagaaaatcagggtgaggagcaaatgagagaaggacgacaggggagggagtgagtgggccatctctggggtcctccagccccatctccctatctgggacaggccccttcttagggggaaggttgttctgtgggcttgtgcttggtggctccttggagacagcttagaaagaagaggctgtgtccaagccaagagtctatctcgccccattcctccatctgcagggaaaaggaggaaggaggcagggaggggccttattctaaggtctccagccctgggggaggtaggagtcttccttttgctgcatactcagcaactgagggccagcctgtgatgcagatgccaatgccacagagcatggcaggaggtctgtggcaccttgtgctgaggggcagcgctcccccgactgtgggccatggagtggctctggattctgtagggttgagcccatctggtccttcccacagtagacatggagaaaggtctcactgtgagcaccagccttgaactcaccatctgttccaggttgtcaccctcctctctgggctttgcaagatactggtcatacccctggcaccctggggctcccagaacttctgggccacccagaggcagagcctccaggcctgtatagacaacacctgtgtcctcgggccttgctgcatctgtagtttcactgatgctaaaagtcctcagaagccctgtgttccatctctccagcctctgtggctctccagggttctgccctgccagcctttctgctgggaagacctcctgccccctgtcccttgtccaactcttgatcattgtttaagacttaacttaggcatggtcgcttctttgggggagtctttcctggctcctcttctcctgtgagacttgcctatctttgggtcactgtgctgctctagggcctgctgtctctgtcaatgttagcatattccccaggctaagctcaggggagcaactgcggctccttcctctttgtattctcaatgctcagcacaaggcctcgcttagcggaggtgttaatgaaagtctgtctgtcttggcaagtgggtagatgggtgcatgggttgatggatggatggacgaattttctggctactgtctgtatggatctgaggaggaatctctctcttggctggggaaacccaaatggaaatttcagatgtccctatgtgaaatttagctaaactcagtgctagtgcctctgggctgcttgggtgtttatagctgaattaggcagataatttgccccaaactctggctgcctgctcctggctcctgtttcccggctgctccatgggcctgtctgagattgtgcagggaagtgcagggcctgcccagcaggatttccgttctgtgtgtgctgccctcaaaatgtctacacactcagatggggagggactattttaggtcctgctggccacaagcacagccagaggcagacgatgaggaggcccagcctggccatcctcccggcgttgacatgagggaactggggctgggatctgagccagagctgggcctgtgctgtttgtgggagcacacggccactctggctagagctgctggccagaccagcagcactggtgggagctgggatggggctcctggaggtgtacccacctggggaggggctgggcctcccctggcctgggacaggggaggaggaggaaatgacactgatttgctctgatgggggaggcttggaccttgccctcatggagctccctgtctgatgaaagagacaaaactctgttctcaaaagcctcaaacccagcagggagaccagttctgttctgcagggagccctggccctctggggaagccccttttctggtatctgactttgttccatgtttttctctgagatctattgctctgatttggctgatccaggaaatctttcactcactcgcctctcctccctgtccctggcactctgaaggacaggcgctccaaggccaacccaggaggcagctgaccccgggtgcagttccagtggtttgctagataactatggctgggctttcttcctctccctccttccccagtgcagatagcatgaagggccctggcttctggggacaggagggacgagaggtctggcagaatctggattttggctggcttctgtctgccccaccggtgtttctcggcagcctgttccatcctcacagttgatgcagccctggctggtgctggatgtgttcactgtgtcctggctgtggtcctaggacccctcctagctcaaacctgctcttgccagagttacccttccatcttggtcccttcctgtcactttcctccgtgacaccttctctctgctcccaaagccttcttaccagcatctgcctaggtcctgggatgagctggccacacatttagaacatgtcaccggagacccttgcctgatgttcaggccatgggctggcactcaccacggagtatttcttaggtttctagaaatgttttggtttgtgtcgagagtggccaattctggaggtgactcaaaacgtgtataaggcaggtctgtgctcagcatcccagggctcgtagatcagtgtctgtctctaagggtaagggtggggggccctgtttagggggtgcctggcctgtttaaactgttctccatggtgatgaggattgggatgagaaatactcacacgtattaactccaccacttgttcttggtctgtgcagccatcctatgtgtagactttagagtggcagactaggggtgggggtggtgtgtgcacatgagtgagcatgacaggtgggggtggtaggagcaggtgtgtgcacgagcttccatgggtgctggccagaggtgtgtctaagcttggtggtggcattgcaggaattgtggccttgactttgaactttctgagggcaggcctgggtgtgtcctcacacagggagagcagaagtgtcctattccatctagttctctgctttagaaaacgatatattcattttttcagataataaaatgatacgtgttcattatataaaatttggaaaatatagaaaaataatgaaaaaatagggcttacctccatccaaacacacaatttgaatgcactgcacccaacatttcattgtcattctttcctcttctttttaggtttctctttctgtctctgattctgtctctgacttcatttctacctttaaaataaaattaaggcctttgttcactagttgttgttgtttttttattaaggcagttcttggtgttatgattatgattaggggaagaaaaacagtgttcaggaacacacagagagcctgccaccccctgtccatttcctatagagggtcttgaagctccaaatagaggctgtgcccccagaaatcgcacctttgaggcactgagatgcccccagagccagctgggtatggcaagggcggctcttgcttagcattccgagagagcactcctaggtagaggggctcctcttcaagtcctcagagaaggagaatttcgggaggtgggaatatgtgagtgttgaagaattagagaaataacttttaggaagttccgactctggtcacaaagagacaagggatgagggggtgtccagaagatctcaaatgagtgatgtcaaagtgaggagatgtttcattaacaaggagaccaaactcttggagtctcctggccctgcaagttcaccataggctaagcaaccagggaagcttctccgggaaggcggcctctgaggcgggtgggtgaacaggggaggacagggaggctttcctggcaggcaaaagggctcgggcaaaggcttggaagtgggactctgtgtgtatgttttatgtggcaaaggggtacgtgtgtgtatgtatgagtgtatgtggtagaggtggtgtgtgtgtgtgtggtagaggtggtgtgtgtgtatgtggggtagaggtgatgtgtgtggcagaggtggtgtgtgtgtggcagaggtggggtgtgtgtgtggtagaggtggggtgtgtgcgtgtgtggtagaggtggggtgtgtgtgtggtagaggtggtgtgtgtgtatgtggggtagaggtggtgtgtgtggtagaggtggtgtgtgtgtggtagaggtggggtatatgtgtgtgtgtggtagaggtggggtataagtgtgtgtggtagagatggggtgtgtgtgtgtggtagaggtggggtgtgtgtggtagaggtgtgtttgtggtagaggtgtgtgtgtgtggtagaggtgtgtgtgtggtagaggtggtgtgtgtgtttggtagaggtgtttgtgtggtagaggtgaggtatatgtgtgtgtggtagagatggggtgtgtgtgtgtggtagagatggtgtgtgtgtgtgtgtgtggtagagatggggtgtgtgtgtggtagagatggggtgtgtgtgtggtagaggtggggtgtgtgtgtggtagaggtggcgtgtgtggtagaggtggtgtgtgtgtgtgtgtgtggtagaggtggggtataagtgtgtgtggtagagatgggatgtgtgtgtgtggtagaggtggggtgtgtgtgtggtagaggtggcgtgtgtggtagaggtgtgtgtgtgtggtagaggtgtgtgtgtggtagaggtggtgtgtgtgtgtgtggtagagatggggtgtgtgtgtggtagaggggtgtgtgtgtggtagaggtggcatgtgtggtagaggtggtgtgtgtgtgtgtggtagaggtggtgtgtgtgtggtagaggtggggtgtgtgtggtagaggtggggttgtgtgtgtgtggtagaggtgtgtgtgtggtagaggtgatgtgtgtgtttggtagaggtgtgtgtgtggtagaggtggggtgtgtgtgtgtggtagaggtggagtgtgtgtttgtgtggggtagagttgtgtgtgtgtggtagaggtggtgggtgtggtagaggtggtgtgtgtgttacaggaggtggtgtgtgtggcagaggaggtgtgtgtgtggtagagggatgtgagtgtgtgtgcgtggtagagatggtgtgtgtggcagaggtgggtgtgtatgtggagtagaggtggtgggtgtgtgtccgtgtgagtgtgttttttgtgtgtgtggtgagcgtggggtgccagcaggagacaggcctggcctgctagtgtgcaggaggcctcgggagactgtttcctcactctgtcgggtgggtgctggggctggccggctctgggactcccaggctcccaggctcccaggcgctggggctggggctaattttgagcctgctgctccagttatagtctctgggatgccgtgaaggtgggaacgtgctcccagaaccggagtggcaaattatgcccgagtcccaaaggggaacgtgtaatttctgaagctggaccagatctttggagcactatgtttagctttattttgctctggtgaactgccggtttccctctcacctttctaaaaaagaactgcattaaaaataacagtaaggcttctgtggggttcaggatgcaaatgggaggggcagagctgctgcctggcgaggcccgtctctggccagctaggggtggcacgtggagttcacccagtctattccaggggtcacacgacatgtggccagcaccccagggccatccagcagccctggctaggtgcccaaggctgattctgccctcctgcgtatgcttctggctctgaacagccctgaggggcccctcagtgatgtgtcttttcacagagcagggagggatccgagtccccaaacgtccctcctgggcccagcagggcttcaccttccgtgggtttctttgggcatcgggggagtgtcttccaggatcttcctgttgaggaaggcagggcagcctggggtttcgccccttggagtcctcccagagccccctgctcaaggcttagaggttgaggggccagccccggcagctctgggtcctagctggctgcttcccagcacctaccctcctgacccgtttgctctttctcgaacgggctgtgcttctttcttcccctctacctttgcgcttgcgattccctctgcctagcatgcgtcttctcaccttgcccacctgctagcctggtactcattcacccagagccccatccccttatcctagagtatcgtagtggtctctgaacaagtcttcctgccttcagccctgagccctgaggccctcctcaggctgcagcccaaggattcacagtacagggagattgattcacagtactgggagattgtaggcaaggagctgatgctcagaaaaggatgcagaaagtgatttgtagcatggagtggaggtgggactataagactcctaaagtccccactgatgtcaggttttggggaagacatatgatgccctggttcttgtcctggaggagggaagactgagtaacctgctgtagctttgggaaccatgccctgcagtgttggtgtggctcagaggttaggatgctggggttggagtgtccctgaaataggcagattttggagagggagggaggacatatgagagagtgggcaagagtcaggcattggctgagccccttccacgtgccttgccttgtgctgggcgtgcacagccttcgtctcattcatactcactgtcgccctgtgaggtgggctttgggcccattctccagataggacgctgacccagagaggtcaaggggcttgctcaaagtcacacatctggtgaggtgttggagccaggcttgtccaactccaaagcacatgttctccctggaggaagagcagagggtgcctggtcagagagcgctacctcttggagactgtccagccttccctaaagtgggttctctaatcctgttgctaaccagcatgtttcatttgtagcttgcagacggtctgtcgagcttggcccccactaacacggcttctcctccatccagtcctcatgtatgtactgtttacttatttgtgggctccttgtattcccttgtggggctgggggtaggggggttaggagggaaatgggaggggagagtgggagggaagaaaggaggtatttcctgagccctagcagggaagtcacctatctttgcctcactgaaaaggaggggtgagagaaagctatggagtagatgctcagaaatggacacccctaggttacttcctgggatttaccttatttacctgtgtgagggctgggggcttaggtggggctgcatgggccagtggaagcggggaaatctctcaattagactctgacttctggagtgtgggaccccagaaggctcttctgggcgtgggacctcagacggcaggctgactttctgtgctcctccctgatgtgtgaaggatgtgtgtgactgaggaaccctggctggcccctcgggtgctaagaggtctgctggggccaacagtctgctcctgcagtttccagcagggctcctttctgcttgcctgagtggattccttaggtgtcatctttctgggctgtgggtccctctaggaagatgactttgatgtctggccttcagcatgcgctcctgaagtcccatggtgagggccagtgggagcccctgacctgtggagggtggcgtaagagacagaacttgctaaaggcagcgagttacattctacttatggtgtcaagaggaggcactgttgtactgggggtctcatgagcttctagaaggaggctatcgatatacatatttttttctgatttatctattttaaataaaatatggaaaacacaaaaagtgtcaagtaggaagttaaaaccacttttattcctaccagtttatgataggcactgttagggttttgatgtgcctagattttttagatatcttttaaactcacatgaatactttttaaaaacaaaattggaatcatacttttttataatttggattttttaaatttaaaagtatatatgaatatttttccatatttgtatgtgtgtatatataatatatgtataatatgtatgttatgtatattatatatatattttttgagatggagtctcactttgtcgcccaggctagagtgcagtggcatgatcttggctcactgcaacctccatctgctgggctcaagcaattctcctgcctcagcctcctgagtagctgggactacaggtgcgcaacaccacacgtggctaattttttgtatttttagtagagacggggtttcaccatgttggccagtctggtctcggactcctgatctcatgatctgcccgcctcggcctcccaaagtgctgggattacaggcgtgagccaccacacccagcctattcttatattctttaaagatatgactgcatgtcacatgaacattcgtaaacttttaactactccctatcatttgccatttaatttgtttatttctcctattgtcttcttttgtcccttaaaggacttattttagttcactttatatatgtccattcagatgatttctttgttttttttttttttttgttacgcccaggtacatctgttcaggccatttcttgttaaagtgtattcctaggcattttatggtctttggtgctgttctaaatggaatatatgttttcctcatgactttgtcgaactatcgctagaatataggaaaacaatatttttgtatatttactttggaactgactctttattaaggcccatttattagttctgactattgttaattgattctgtttggttttccaagtaggtaagattgttttcttcaaataatgataaacgtgttagtttctttctaatagtaatgcctcattcctttttccaaataccatttgatatttgagatgctgctgagcagacttatttagtcattcattctaatgagactgcctctaccagatttccattaattgggatgatgattgatggtttcagacagatatttgattttggcaaggttgtgtcctttattgtttgtttgtttatttttttattgtttttgagatggagtcttgctccgttgcccaggctggagtgcagtggtgttgtcttggctcactgcaacctctgcctcctgggttcaagcaattctcttgcctcagcctcctgagtagctgggattacaggtgcccaccaccgcactctgttaatttttgtatttttgtagagacagggtttcaccatcttggccaggctgatcttgaactcctgacctcaaatgatccaccctccttggcttcccaaagtgttgggattacaggtgtgagccaccgcacctagctgattgttagtttattaatagcttaaaaattagtcatggaagtttaattctatcaaatgtcatttggcatttattaagatgataattttattttccattgtctgttaatatagtgtataattgtgctatattcctggggtaaacccaaatcggtcaattggtcatggtattatagtttactacagttgcagccttcttatccaatgcaatcgagacaggtagtcgattggctaattgataaagttgattaaatagggacttatttttttttttaattgtactttaggttttagggtacatgtgcacattgtgcaggttagttacatatgtatacatgtgccatgctggtgcgctgcacccactaactcgtcatctagcattaggtatatctcccaatgctgtccctcccccctccccccaccccacaacagtccccagagtgtgatattccccttcctgtgtccacgtgatctcattgttcaattcccacctatgagcgagaatatgcggtgtttggttttttgttcttgcgatagtttactgattaaaagtcctgcaaatgtaccacaaacattttgtttttaaccatgtccatgtaactttatttgccaatcatttgacatgtgccacaccctctttttgaatttggatgtgctgacttgtgtgtcatgtcatccttttggtataaatcatatccaaaatgcattatccaggatttttagttttaggtttattaaaatttgatgagaacttaacgatacttgcaaaaaaaaaatctgagtgtagagtcctcttaaagtttaagatgcccttccaccttttatgttatctcacttgtacttgatattcatcacttaaaaaaaaaatcaaaagcaagccaggtgtggtggctcttgcctgtaatccagcactttgggaggtcgaggtaggcaaattgcttgagcacaggagttgagatcagcctgggcagcatagtgaaaccctgtctctacagaaaatacaaaaattagccaggtgtggtggcacatgcctgtagtcccagctattcaggaggctgaggtgggaagattgcttgagccccagaggacgaggttgcggtgagccgtgatagcatcactgcactctatcctgggtgacaaagtgagaccttgttgcaacaaacaacctcaccaaaacacaaaagccttaaattagttttcatagatacaatgcccttcctttttatattcaaattctatgtgtttttaaatatatactttgtttatccaattaccatattagtacaacccagctcatcttctggagctgcagtgggcatcctagaacagctgtggacagtcagtggttctggacctcaggcagattgttggcagacaggacagacagcatttgttaatcctggctaagaagttttaaggagagcttctattatgtattattgagttaggtttgctactacttaggatttttacgtctctattaataagtatgactttcgagttgtctttgttacactttgatatcggggttatactagtcccttaaaaggcttttcaggtgtacttctactttctgtgctcttaaacaggctctgtggcatgataattattgttgctgaaaggccctaaaatacaccagagccactgtttatgaacttaaattatgcaatttggaaattatatgatacaaatatttcaatagtttggctttatgtacaaaatgtgtaatagtaggaaacctaaatttaaaaaaaatgaccgacaatcatgtaatttaaaaggtggtgaaattgtatctatggtttcctaacacgggatagccatcattttttctctaaaatggtgttatatgttttgaattatagaagattttcaggaacgcatatcttatataattgtataagatgcaactgtcttgtatgcattcgtaaaactgggctcaacacattttctggaggggattctttgatcattttgtacttcttcaatcaatttggtagctgagatgtcatcagatactgcctgttaacactggtataaatttgtacatattactataatgaaagctttgtatctattctgttttcatcttcattcttaattttatgtatttatgttattttccttttttattaggcttcatatcgtttcatctattttatagttgttttccatccaaagaaccagctctttaaaaattctgctgatattataatagattagtttctttaatttctacattcaagtcatttttaagctctctcaatctgaaattcctattatatgtattctagatatcttgggttatcactttatctctttctctctctcttgtttagaaaagactgttaaagggagctatttgtctatattttcttctaaaaattctgaagttttgcttttcacacttcagtatttatttcacctggaattgattttgcgtgcgtgttaattgtgaggtagagtttttttctcatgtaactaaccaatgaattaatatcatcatagaatgatctgtgctttctcattgatccacagtgacagctgtgtcatttgttgggtttccatataagtgtgggctatttgtgggctctctattctgttccattggtctgtttgtctttctctgggctattttagtatcttatttactatagctttctaataggtcttgatctctgataaggaagtactttgttcattttcagaagtatcattgctattctagtcctttgcttttccacttcagttttagaatcagcttgtcaacttaaaaaaaagttgagatttgtgacagagttatagtgaattgctggatcagtttggggaaagcagacatttttattatattgccttttaaccatgaacataatatatctttccatttatttaggccttctttaatggtaatttaatgcatttttataattttatccaaaaatgtctagtacaacttttattatatttagttctagcaattttatgcattattgttctctttacttgaatttttaaaggtacattttctgactggtttttgcttgtatataaatgaaatcgattctcatatacagattttatatccagaaactttgctaaactctcttatgaattatactggcttgagaattctcctggattttctatagagtcaatcatataatttgtgattaattacaattttaattcttctgtctatatttcttttacttttttattttattttcttgtcttattgccattgactagaaccttcagctgatgttctatgtacttggttatagagagtattcttttctgctcctaattttaaaatgaatgtttttatgttttaccactgatcatcaaatttatcaggtgaacctagttacctgttagaatcttactagttagctgttttttttcatgaatgttgttaaattttattgaatgtttttaaagtatccatcgaagtgatcatataattttgctcctttaacctgttaatgtagtgaattacattaatatataatacataattatataatatatttacatatgttaattaataacccaagttatctaaaatatatataacaggaatttcagcttcagagagcttaattacagtaataaatatatctatattagtacttaaacaactttgcatttctgaaacaatctaagctgatcatgatatattatcttttttctgcattgctgggctcagtttgcaaacagtaagtttaggactttttttgcatcattttttgggatgatattggcttaaagtgtttctttttcatactattattttcaggtttataaaatgacttctgttgtgtaagccgtaagattggcattatccgttgcctaaatgtttggtagattcactcataaaactgtctagacttagtattctttttgggaatattttaaattgctgttgcagcttttaaaaatgtttataggacctttgagattttctgtttctaagtgagtgacttttggtgatttaaattttctaggaattatctatttcttcctaaaaatattggtgtaatattttttatgatctcttaatttttcaaaaagaatttcttctccatctagttatgcctcctttcattctcaagattatattttattattcttgccagaatttatcagatttttttcagtctattcaaagaatttttagttgatcttctctattatttccttattttataatttattaacttcttttcttctattttattccttccattttatttcttttcttccattttgggggagtttattatattttaacctctatgtaaacatttaaggctctaaaattccctctcactactgctttatgcatcctgtaggttctgacaagtaatatttttgttatttcccattctgagtattttcggatttttattatttctttttgacacctaaattgtctaaaaatatggtttttggaagttactaacttatattttaaattatcttttgttattgatttctaggttaactggaatggtctctatggtccagagagtgtagtctgtgtgtaacgatataatacttagaaatggcctgacacttgctttatggtctagtttaaatctgtaactgtcctgtgtgtgcttgaaaagaatgtgtattgtccagatgtcttaaatattcaatgtgcatttagaacaggcttgttaattgttattaaaatctgtactcctgatttttgtgtgtgtgtggtttatcaatttctgagcgagacatgaaaatattctgctttgatgtgacatttgtcaatttctccttataattccacctacttttatatatttgatgctctctatattttttctctctctatagagaattcttatatcttcctggagaattgaatcttttaacaatatgtagcaagcctctgcccatttctgtcttttaaaatctctgctaatgagtttttcttaaagtctgttttgttcatgttaatatagctaccccagctttcttttggttagtattttccttgtatagctttttccaccttgttactttcaacttttctgtctttaagttttagctatctctcctgtgaacagcaaatagatagattctatttgtgtttaatgcattctgacaatctttactaatatatttgaatttgtttctgccatcttattttgtatctctatcagccttttttcaattaaaatattcccctccttttttccatcccttctcttctttttagtttcaaaactatatatgtttctatttctttagtgattagtatagaaattttaacatggcatatttaacttagcaaagtctaaatttaattggtatttatatcttcctccagaatattacaaggaacttagactgctttaactccaatcacctatcaatttgcaaacttttgtacaatattttagttttatcttttttacctacctttttaaagcattattttattttaagtaatcatttttttcttttagctatattcacatttactttttttttttaatatccgtcatctttttcctgaagtagggcctattgaaattcctataattgaggtcagttcattataaactttctcactttttaactgtttgaaaatatttttttcacccttatcttggaaataatagtttcactaacagttattttctgtcagcactcttttctggcttccattgtgctattgttttcacaaatctgaggacttaaaaaaattttattttaaagttaagtttagttttggctgggtgcagtggctcatgcctgtaatcccagcactttgggaggctggggcaggcagatcattgagctcaggagttcgagaccaacctgggcaatggtagcaaaaccccgtctctacaaaaaatacaaaaaattagctaggtgtggtggtgcatacctgtagtcccagctactcaagaaactgaggtgggaggatcgcttgagcccaggaggttaagggtgcagtgagccatgattgtgccactgcactctagcctggcccacagagtgagaccctgttgcaaaaaaaaaaaaatttaaaaagtaaaattagtttaatttaatttttaaaagatgttatttttattcattctgagcaattctcaaccattatctcttcaaatgttacagattccattctctcatcatttctggaactctggatatacagtggacctcttctattcttcatgtctgtcaaattttctttcatattgtttatttctttggattgcactctggctaatttctgaagatgtatcttcttgttcacttgatctttagcagtttctaatctgctattttaccctatctattgagttttcagtcttaagtactatatttttatttctaaaagttttattcccccaatctgcttgtttatttttgaaggtctcctgtccctttgcaatatttttaatgccttttatttatttaaacagtttttccttaaagccctatttctgactactctgacttctgttgtctgattctgcaattggttggctctagctggctcttgctcatggtgcctagttccttatgtgtttgattgtgaactcatgttccttggaactttatctgagaattctttggggcctgggtggaagttacattcttttagagaggatatgtgtttacttttaccagatgtctggagacactataaacacagattaacttaaaactaaatgttcagtgtgtggctttttgggtccactagttagtatgcattttggctccttatttctctggatttttcctttctcatttgcccttaagaattttctttacattcccatcagctcagccatgcatttaaaatggattttagaaatatcttttctgttaatttaggtgttcttacttggagggtttctctggttgtctaatttgtcattttgctggaaatcaatgtctttattagaggtttaaatttgaagtcatggttttcatcatgcaggtttatctccttcagggttgtgtactctaatttcttgtttgcagtttcctcttaagacttcctatgaatacacatgagccatttgttttcttctgctttttactcaactctttaagagcattgggagacatttgtctttgtcttcagatcgctcttcttcttttgcccttaatatcttcttttttttccttgtgtttatccttacagagggaagtccttgcttgtcaaatactgggacctcagttagattctttccataaattcatgggcccttctaatctcaaactcagacaaaaagaagaaggaaatagtttagatttgcagtagtttcactttgctggttagaaatccagcagggtgggagaagtaagaaggaaaccaggatcagaggcagctatgtggggctattcttctgggctgaagagtttatttcctatgtttgttatggtagtcaggggttagctagggtaggccagagggccagagctgctgcgcctaccaatgaactcctatgtaggaatttcttaagtaaagtagagttgaccctctcccactaggcccaccaggcagggtgttactttagggaagtttctacagttttggctgagtgaatccttaaccttgtgggttcagacacctgttgggtcaattttctcacggctagatgtgtaaacttacatgagaaatatagctccctggggcatgtgaccttggtggctggtccagcccatagtctcctataggctcagtgagtgggaagccaaattgtgattaagagtgagaaatcagaatgaggagagagagttctgtaatttgaactttagtgccagctgacttggcactgacacatccatctccaaaggtaggggcagctttagtccctaagcctaggtctgctctcccctgatggtgctggtgtggacacctgtcagtgtttactccttactcctgtttgcctgttcttcaggcctgattagtacctttcttcatggatatgctctttctctggattaatacattcttcctaattatggttaagtcttagtgtaggaggcattcttccctgttgaggtgactttgcctctccttgctctcaccgactatgaagttatttcatggtctaattctctaagggcagccctatttcccttaattccaggttggggggatgtgggatgccttattgcagctcatgagtactgacaacaatttattccaagactttgaagcaaaggttttctgagcaaaggaatcaattacagggtgtggctcccaagtgaggaagcattttcagaaggcatccaaggcagtttgtctctgaacttcatggttgcacctctgagcttgagacttagagggggagtattttaactttaataacattcatggttttacctgtacttttgtacatatcagatgtgctaattaggaagtcacttatcttttccttaaagtaggtttcctaaggacatgtatttggcaatattggtttagcaagaattactgtatgtgcttgaaagtaactgtacttctttaaaaatatcacccgttcagaagtgttgccagtgaagcctggcctccccccactcctattagttctgattagggaggtttgatgcccgtcactggtgtaatctggaccttcctttgtgactcattctttctctcattttctcagagcaaatacaaatcgcccatcaaatgacaagtgaaagcacagggggaggcgaggggagggaatcagggccgaaatctgttagctatttggagtaattggttatttgctgtgtttgctggttgggaagcagagcacatacttcacggtctctcctgttacgggggctggagtcaccctccgatattggatcctcgttgccggagcccttggctcggggcgccttttccctgcttggcattcctgtggtctcctcgggagtgcacccctcctccctcgctgcacactgcaggggggacagcctggggtgaaacttgtctggcaaacttcagggctccatcagggaggaggaggccctggcttccaccatccggcgctccttgcctccacctcatcctgacataacccctccaccaccccctgccccaagaggtctttcccctggtctgagagggatctcttttcccatctagagaaaaaacactcatctcttcctagagggatattcttggcttcccttggaaatctacagcataggcaactgtctctgaggtctaacttgatgtcttcctatctctattggtcctatgcactggctactccctagcctgggtcaaaatagtgcttggaagttggtacagcgctagctgctgagcacaagactcccctgagtgtgcttggtgaagcttattaacccaccttttgtctttaactcttctctacattaaccaaggcacagggaaatcagagcaaattagcaacaagttcaaaatataaaatatttgaaaagtaatgtgattttgtatatgaaaatgcatacagtaactagaaagtaggttgactttggcacatagtaggttccccccaaatcctcttaaaattgaatttaggagagctaatattagtgtctgtagcttgatgaatgcttctgcagtcttgggaaggccttcaaaaatagtttttctcttaagtagttgtaactcttgttaagcaaaattgtctacataagcagaaggaagataaggtatgctgcccaggccctattggaattgtcacagattctgaattagtcatgttttgttgctttcttcatatgtttgaagagtctgatggaagcttctttcattcacctactggctaggttccattcctctaggctttctgcatagttgtgtgggatcatggtgccctcagagaatccagtcatgggcccccaaggatctatcttagactcctgaattgagaaagcaccagcaacctcgggttccccacagctccccgactctctgtgagtcccccatctggtggagcaggccaatagtcaagtgatcaggtccccttgccatctgtttgactttactggatgtcaggcccatgtagtctctgggcctttggaagcaattcagcattttggttaaaggtctttacttctttcccacctctgctgatccagaaatcagagtaggtggagtaatgatcccctccacagatgaggaggctggactgcagggagtgtcaacaagaggttgaaagcccagtgttccacttgtagaaataattaagtgacttttgttataagtgtgtggagttctgctgaatcaacgtggtggctggctgtgggcatatgtctttgtggctttggggggcataagtgatttggtatacacagggtggagtagttttgaagtcggagtatttgcatgtctggggttttgtctggtctacatgtaggcatgagtaattttatgttatttatgtgtttattcatgtgtgcatgagtaaatagtccatttcctaaatctcaggacatgaaagaattagaggaacctttgtaccgtgattccagtactacagatgtagagctatggggtagcagtactggagatcaaactgatgacactggcaatatcaacaagaacattaatcatggtaaactttacaggttacagcatatctttgtagatatctactctgagccttacagtaaccccagtgttgggttgttatgttactatcttgatgatgatgatttgtactaagagggaaattactttcagcacagtctaggatgtctatctctgggttgacataggcatgaagggctacttaaaattataaacaataatagaccacatttttttttaagagttgggcatatagttctgcatagtgacccaaggtttaacgttataacctcggtgacaaatggatttgaccagaaatttttctctttgatccaactggtcatcctggggagagaaaacaagttctgtacctgccccctgtctcctgcttcctgacttcacagaaaggaattattattgccagtttttccacccgtattcatgaaatgtgttaggtctactgaatgatgatgggagattaaatatttggaacgtatcatactgatttgggtcttcagggggattaaggtgctcattagactggatcaagcctggagaaatagatctccgctattttctctggctgcccaggaactgcatattggctattagctgaaactggagaggcttccagtccatgccttggtcggacttactgggttggctgactgcacaatgaggggccttgaaccttgagcatgggggagtggtgttttaatggccagacttcttgttaaagcctaaggtgacacttcaaatatcaaaccttttgtgtttctttttcctccttgccatgttccaaaactggatgcttagctattgcaaaatgaggtaaaaaacacatttggaatgagaaaacataccaccatttcccttttggagctttggaatatgggattccattaacatcagagggttagttggctttggcacctctgagttcagacatggaatagctgtcctgttttttgtggggctctttcttatggctgtgctaacttattcctggacttcccggggaagagaagggagaagtgggcttgaaataactccatcagaagccagatgagtgaaatagcagaaatgacattttcaagtcacatctgtgagtgtgttaaaaatataactttatttttctgtaaatcaacttaatctctcctgtgagcccacatttttcctgatggcagaaaaaccccggtaatcatcaacattttaggtttaaacttaggcagtctgggctttctatcttcctccttaaccctgggaggcagctcagttctgggttgggcttccataatgtcatgacctccacagggaggaagtcctggtcaccagtatgtgtctactctgacatttagagacccactgatttctgggcacacaggccatactgcatcttctcatttcagcccccaaatccttctagttttcctggctctttctctctccactaactttcaagccctacagggagtggggcaccattaagcagctctcccatgacactctggggtctgtgggaaattccaagggcttaggctctgtctcccatgacacccatgcagccatctccaatcaactgccccacagccaattcctctggcaacttccgggtggctgctgctgcctggacccccaaagttatagaggggtctgttccgtgtacactttggagctgacctggaggcagggtgtgcggtgccttatcagaaaccatcacaagtctctagttctcgcttcctttctccttctacactttcatttctttcgcctatgatggggaaaaactggctggacaaaacattcttttaaacctattattttaatggcacatgatcagcctttgtaaacttaaaagccaaggatcaccccctctttccccacattctgctgtttaggcattcctgtatccatcaaatattgacagaactgcaattatgtctttcaggcaatgttctaagcattgaggttatgagtgttacaaaagataaagggggctgggtgcggtggctcacgcctgcaatcccagcactttgggaggcagaggcgggtggatcatgtgaggccaggagtttgaaaccagcctggccaacatggtgaaaccccatctctactaaaaataacaaaaattagctgggcgtggtggcacacacctgtaatcccagctacttgggaggctgaggcaggagaattgcttgaacctgggaggcagagcttgcagtgagccgagatagtgccactgcactccagcctgggcgacagagcaagactctgtctcaaaaaaaaaaaaaaaaagaaagaaaaaagaaaaagaaaaaagatgaagggctctgccttcatggagaaggagatacaataaacaatattaatacccacgtaaaatctatgggatatcagatggagataatcactgtggagaaaaagcaacaaagagggaataggaattcttgagacgggattgtgatttacaatatgggaaataatgagggtgagactgaggctgcactggaatcaagacaagaaggaaatgaggaagtggcttagggatctatcagggggaatagtgttcctgccaggggaaggacatgagggtgctggaagtgttcaggaccaggaaggcttgttggctgcagcagcatgagtgaggaagaaagttgaaggacgtgaggtcagggaggtgtgagggctcgatcacaagcgactttagaagttattacaagggctttagttttattctgagtgagctgacaaatcactggagggatttgcacagagggtgacaagatccgatgtacatggctgttgggttgagcacggattcagggagcaggacggcaaaggtgaaggtggggaggccagttaggaaactgctgcagtcatcccacatgggatgatggggctggactggggcggtagtgacagagtggtctggttctgagtatacactggaggtagtgccagcatgagtgactgatggattaagtgcaggtcgtgaggaacaggagtcaaaggtgagtgcagggattttggcttgagcatctggaaggagagagttgccatttgttcatatgaggaaggatgtgggaggagcagactgggcagggatgttcagagataggaatctggacttagctttgcaaagcctatcagatgtccagtgggagatgtcacatgggcagctggagtccagggaaggcacccaggctggacagagctcaaggtgggactcatcaatgtatgtgctatttaaagagctaagacccagggagaacccaagggagtgagagtggatagagaggatgggctcaagcactgagccctgaggcactcagatggccaaagcatgggtgacaagaaggaggcagcaaagaagactgagcaggtgtggccgctgaggtgggaggacagcactgtggtgctctggacagtggagctctgcaaggcgaggggagatgcttcagggacagaggagtgaccacttctgccaaatactgctcctggattgattattgaggcctgagtcattggtgaccttgacaagaatgttttgagggaggacagagaatggaaacataaaaattagagacaataagtgtggacaactctttctagaagtttttctataaaggggcgaaggtaatgaggtggaagcccaaagggaacgtgtgggcagagagagagacgtattctgtgaatagtggggcactggtgcctatgtgtgaaggctaactggaatgacccagaggggagggatgttggtgacacaggagagggtgaggagagtcacggagtgatggccttgaatggaccagagaggatgagccccaggcatgagggcagaggttggccttgggctggggtgcaagccgagcacccacaggagcagaagggaaggtagcacgtggcatgggtgctggtgggggcttggggaagtctcttctggttgcttctgcttttaggagaaaggaagcagggacatgggctgagcatgaggccagggaggaggtgctagagggctggggagagggccagtgtggcaggtggtatcaggagaaggggcgagtaaagggccagggaagtgagatgaggtgccgggcggcactggggctccttgaagctgtgccaggaacttggtgtgagacccagcagctggtttcatggtttccttcagccacatttggttgtggggggctgatgtgaagtggagaagagctggatttaaccccaggtggcactggccagaagtacaatggaacaagagaggtggaaggagtttaggagaaggaaagggcaagggggtaaacaaagcattgtaggaccaagaaaatattagttaatatgtaaatcatgattctgccacatgcctaattgctgttaaaggtgcaggccattgattagaagagggtttacctgtgggatgcaggacgaaaatgggggcaaaagtcactgagcagccggccagctggtgtggccgggaggaaggtcataggccattcgtctcagcagctgtgagtctgctggggaacagcagctgccagacatcacctggaactttgaaggaagagggaattgcagccaagaggggaacttggggaaaacagtgtggtaagatttaggtcctgttggtggtaaatagcttgttctattaaaaaaaaaaaattgaactcttatttccttagaaagaaacacttgagattcctgcttttattcttttgtttgatgttatatggttgtatttgatcatttgttctttttaattttagcaactttattgagataatccatgtgaatacaggttcttatttaaagtgtacagtttaatggtttgtagtatattaacagagttgtgcaaccatgaccggaatccattttagaatatcctcatcactgcaaaaaaaaaaaaaaaaagtactgaagagcatttattcctcacaataactgtcaaatttatgctattatttttccatgacagattagataaatggagtcctaaagaggttaagtagtgagcagtctctcccaaccactcccagcccctggcaaccactaaatattttttgtttctatatatttgcctattctggagcttcatataaatgaaatcctacaatatgtggtcttttgtgattaaattctttcacttagcataaggttttctaggttcatctatgtcataacatgtatcagttcttcattccctttttattaccaaataatgtgccagtgtaaggatatatcacattttctttatccacgcatcagttgattcatatctgagtctttccaccctttagctgttatgaataatgctgctttgaacattcatgtacaagtttttgtgtagacataagttttcatttctcttggatatatacctaggaatggaattgctaggccatatggcaactctaacgtttaatgttttgaggaactgccaaactgtttttcaaagtgctgcaacattttacatcctcaccagcagtgtacaagggttccaatttctctatgtcttcaccaacacttattatctgactttatgatgatagccattctagcaggtgtgaagtggtttctcattgaggtattgatttgcatttctgtgatgtctaatgatgtggagcatctttccatgtgctattggccatttgtatatcttctctggggaatgtcaacttaaatacactgcccatttttaaattggatgatttgtctttttatcattgagttgtgagttctctatatattctggatacaaatcccttatcaaatatatgatttgcaaatattttctcccattctgtgagttgtcttttcactttattggtagtgtattttgaagcatcttgctgttgttctttatttaaaaatttttaatttttaaagctatgcaaggaatacttgcatacaatgaaaaattagaaatttttgagttatacacaaaaaggaataaaacatgtacaattttaccattcagagtgccactatgaacttctggggtttagtccttttgttaaaatgagatcacattattttttaaccctttataaatctcatcagttgtgagtaacttttcatgtcagtaaatatatttttccagcatcactttttaggttgtgtaatgtttaatcatatggaggtaccgttcagttccaagcagttcaggtccaaacagttccttattgttggacacttaagttgcttccaatttttcacttttaaatgaagtaaaatctttatgcatatccatgattgctttctttggatagaattctggaataagattgctgtgtcaaagtgcatgttcttttaggctatggaaacgtgcagccagtttgccttctggaatgattgtggccatccgtgccccaccagcagtttgtaggagattagctcttggccaagaagctaaccaggtctatgcaacaacagcaatattactattatcagtaagagcaataaacacttacgttgcatttatgtgtaggcacagttctgagcactctctctatattgactcattgattcctcacaataactgtcaaactgatactattatttttccattacagataattgagtccaagagaggttaagtagtgacccaatgtcacaccactgagcgtggcaggatttgaacactggcagtctagcttctgggtcctggctctcacccaccctgctttactgcttctttatgtctatatcacatgaaaattattggcagaggcacctatatgtgcaagagcccagaagggagaaagcctgatactgtcaaacacaatgctgactattgctttaaaatattctttataatgctaagaaagcttccttttatttttaatttactgagaggttcatttgagaataaatgaaaaattctaacctcttaaacatccattttttgtttttgttttgcatattataaactaggggctggcaaattttttttaaagggtcagatagtaagtattttaggcttgggggacataaggtctttgttgcaaagactcaactctgcaattgtagctgaaacctgctacaaaatatattgatatttaaattaccaaactaggtggctggccagtaggccatagttttcaaatctctgctgtagatgatcctgtgggtttcctctcctgactcactgatgctgaaccactcttgtattctggaataacccagcttgaccacgccagattgactgctgccatctgttcgttagtgttttatttaggatctttatgtctctcttcaggaatgagattaatccgtgtgtgtgtgtgtgtgtgtgtgtgtgtgttgcttcgtcaagttttgcttcataaaacgaatgtaaaaactttcatctttttctatgctgtggaacaaagaatgatttattctttgcaacactcatagaattttcccccaaagaaatgatcttggcctcctgtctttttttggaagtagatcattgagatcttttccactttcttttaaggttattgatctcttcatgttttctactacttttgaatcaattttggcaatttttattttcctagaaaatcattcacttcatctacattttctaagattctgtcattggtttcagcctcataaacctattgatattttcattgtctgctataatatcttttgatttgatttttctcattcctaatagtatatctacttttaaaaattagatttgataaatgtttatctattttttttttttttttttgagacggagtctcgctctgtggcccaggtgggagtgcagtggcgcaatctcggctcactgcaagctccgcctcccaggttcacgccattctcctgcctcagcctcccgagtagctgggactacaggcgcccgccaccacgcccggctaatttttttgtatttttagtagagacggggtttcaccgtgttagccaggatggtctcgatctcctgacctcgtgatccacccgcctcggcctcccaaagtgctgggataaatgtttatctattttaatggtcttttgaaatcttgctctggggtttaatcatcaattataatattctcctttctaatatattcatttctatttacaattttctttggtctttctgccctttctaatttcttgaattatcaggtaatttattttcattccttttgtataaaagtgaaaacacttaagataaaattttttttttgaagacaggcttagctacaactcgtacgttttgggacatatatctcctattgttggtatttcctaagtatccgaggttttagttttggttttctctttgacccaggagggctttaagcatatgcctttaaatttccaaaaggttagtattttatttaaaatttctcatttttctagttttattgcagtatggtcagaaaatgtgactgatagtggttttatttctgggactttactgagatttgctctgtggcttttttatttttttctaagtgctccaaagatgctggaaaagaaggtatatcttctgtttttagtgtaaataatgtttgtctatttagttgtcactgttaatggtattattcagactatctgtctctaattcctttggaaatttacttggttattcaggattgagggaagtgtgataccttccccacaattcttgttcctgtcttttctttgtacagaactcactggttggttgtctgtctgtgcctgactctgagcctgagttataaactcaaacctttaagtatttgggctgggaaagaaaaataaagatttaggggaactcaacagctaaattggattccattctaaccatttctacctaagtgtccatgtttgcctgtgtgccagtatgtgcagttgtgtgtttctgtgggggcatatgtgtgttttagcatacacatctcctttggacgtgactgtgtaagtcagttcttctgcgtgtgggtcatcctgtgagtttgatatgtatgtctgtatatgtgtgtcacccatagcatctttttctttaaattgaactttaaacatcaaggcttgggtctgccttgctctaagctggctttttctagagtggttacaagtcagaaagctctgccatgctgtacgctaccccacctgaccttgtttcctctctcctggctgcagaagaccctccgggtaagtgggtctggtagggcctggctgcagattcagcctcactctggtacacgttccctgtgtggtgtgtctggagacacctggccacacaaggtgtgttaggaccacacttccaggacgggtggagactcgagaacctcatcctaccgtctccccaggatgcctgttcaggaacccttggcggggcaccagcttgtgtttgcctttagtaagctggagctcagagcacttggctttagtttgaaggggccaccagcattttcagaaactctgtgataggtgttcagttcctggtggagaattagagcaggctcctgggagatcttctagcctaccttctcatacagaggaggaaagcgagttccagaatgagctcctgaagccgtgtccttggcccttcccactaaaccagataagctctaatggtacagatgggctcagagtgagtgatgggaccttggtgggcttttggggtgaactgaccatcccagcttcagggagcttggtgaccctctaggtgataggacaccccacctgccgagacaggacacagctgaaggaatattctagacaccagagctaagagggcctgcagacacaccatgtacaggaggagttaaatggtggggaggtcaggatttgccacaacaggcctgtccatcttttcctgcaaataggagtgactggaggaaggatgcggatgtcacacagaaaatttgtgctgtcacatacttcctttcttctcacctaatacctcacatttagcagtgtctttggaataaaggcacttagtattagttgattttcagggactctgccttgatttgaccttggggaggttaagtgctgatttccaatgcttcctttattgcctgggtagggaggcagatgggcagaatagataaaactcttttgggtctgaattttcctggatctactgcattttgttcataaataatacattattgacattttcccctaagagctaccctatgtaccctctgattttggtctcagtgtgttgtgtccctgggatgcaggaactacaaagatgcttatgcccacttcacagaaaggaaaagggaggctggggagtttgacagaaacacacatgcttggggggcagagccagggctagagcctccgcctctcaacaccaaccaaatgctgaaacctcttcctcagtctgcagtctttgccccaggagaggcggaggtttcctctctctgctcccccacatcacccttaggaaagccttgtggtccagagcggcctagcagcggagggagggtttccaactctgaagaatgctgcttggcgagtcctgtttctgaaatggtctctttctttctacccactcaggaggaagagttcatcgattggtggagcaaattctttgcctccataggggagagggaaaagtgcggctcctacctggagaaggattttgacaccctgaaggtaaggcctctcttcagtctgacagtcggtgtgtgtgtgcgtactgggcagtgggagacacaacagaaagagagctcatgcagtagatgtatttgcatttgtctcctcattcggtgtctgagggtgatgaatgctgctagaccagctgggtgagaaagccacccaccgatttacagcccgaagcaagtgtgggctgggataaccaagacagtattcccaggagaatgctgaagaatatggaagtgtttagaggtgaaatgatctgtgttaacgtgccccagccccctaccccttcccaagatcagggtggccccctcaccgattttcaaaatagtcaacattattaatattgcatgacattgaaaacagttaaagcttggagatgggtacgcagggatttgttgtcctatcccatgtctttcagtgttatttgaacttttctatagtagaaaatttgtgttaaaataaaaagagagtcggtttgagaatgtactcctgacccctaactcctacaattgggccagaaaattacctacaaatctgaaaatatgggaaaccctgtttctgtggaaaaaaacagaaatgagtcagccaaattgtggtattttgaggaaattatacaaatataattatgctttgaaaaagtagactacttttaaagaagataatcagaggtgactcagaaattactccttaaaggagttgcatggtctcctggctagggttgccagttaaaattcaggatgcccagtcacatttgaatttcagatgaacaatgaatagttttttaatatcagcatgcatcaaatattgcacggggcatatttctttaaaaattattggttatgaaacaggaaaagttcccttatcccccttgcagggtgtgcagtgggggtgtggctggcttcttcagtgccctgctgctcacacctctaggggaacatgcagatgggcaggttgtggggctccaaccccacagcagtgtccagaggtgaatgtttacagctgaagccccagtggatgtgtgttacagaggactatttcagcttagccatctgtaggcggcttgtgttagctcaattagacccctgccttatcacaagcacagagggctttctgtatcccggggtttcttgccttggtgtactgaaagaattggatcgcacgtgggcttggagattgagtgcaaggttttactgggtggaagtagctctcagcagattggggagccagaagggagatggaatgggaaggtggttttcccctggagtcgcgctgctcagtggcctggactctcctcccaccaccaggaccaaactccacgttgttccgctggtcaatggcctgctggcctgctgaggcctgttggtgtgctcctacgccagtgggtccttctcgacatcccgccgcttgtgtgttcctctgcttgtgtgttcctctcgatgtccagcaacttgtgtttctgcccgctagggtcttgggggtttttataggcacagaatgggggtgtggcaggccaggatggtcttgggaaatgcagcatttgggcaagaaaacagaaatgcctgtcctccctaggcctgtggcacaggcccgggggatgaagccctcgccagggacaccgtcctcctctacccagcacttacctgaccccgttctgtatcagttatttatttgaaattcagatttaactggaaattgtgtattttcacttactaaatctggcaacactacttctggattataaatgggggagactctgtaccccgcaattacctcccaggcttggagaggagaaaatgagaggtgggcacaggctgttagacacataggaaaggccccaagagccctttggaggggactggatgagagagagttgaagcttgtcagggtagcaggtggcctgggctttcaggtgattcttttggcgcagagtctctgctaggcactctggagggcagtttcaccagtcagcaaaagttgtctctgctctatgggcctgcctggtgaattgtgcctggagacctggctgctcagagatgaggcacaggcagcagcagctgcgatcctcaggcagcaagttcctcctcgacttggtagttgggtgtgtgaggttgggcaaagagacagaactatttgtgtaccaggaagaaggtctgacacattaggtctggcatgtggtcctgtggccttgccaaaaagtcagacaacccaagcaagaatgaggactcctgccagggtggcccatggccctggcccctcgctgctccctcaggtgcggatgctgaattggcacccagccctcctgcttgacctctggaggaggtctctgacagcatccaagtgaaaataggctgtccaaagcaaaatgcattcaaactatttctggggggaaaactagacctggaaggaacgctggttctttaaagataagtaaatggaagaaaaccaccatcaccaacgtgggtctttgaaaaatagcctgccacattatggagagagtggagcacacagtgggtgcaggaaaacagattttagaaatcactagcatagggggacaaaacaactcctaatctaaatagaaaaataaaggaacaaaagacacaacaagaaagcattaaaaacagaaaccacagaaaatgcatagtaaaaaaagaacaaaacatcttaatgttcctaattaataaaaatggactaaacttccccattaagtgacaaggactcttagactatatcaaaagtcaaaattcattgtactgtctttaaaagacacatctaaaacaatacaacttagaatggctaaaaaataaagattttggaaaacaatattttagcaaacaaggtaagtgtaaaccaaaggaaaacagaatttaaagtgaagagcaaaggaaacaaaatagagagttttatataaataaaagatgtatatttcaatgaaaagactctcaaatatttatgcatagaatagtaaagcttagaaatacttaaagcaaaaatggataagaatgtataaactgatatctcacacttgataaaagcacaaaatgacagaaattaaagttgcagtggggatttcattacaccattctccttaactatcaagcagacaacaaatacataagaagataaaagatctgaataacaaggtaaatgttttttaagctacatgaaattaaagttatagctttaaaatagagaataaaaataataaaaaatggagaatacattttttcctgatgctcagcgaatacttacaaaatttgatcacatattagttttgtagtaagttaccaaaagcagaaatcatacaagacagattataatgcaataaaatgagaaattaataacaaaagtttaaacaaaaagttcaaccgcttagaaatttaaaaaatattttattgggacttccagtatgaacatggctgcataagtcagcatttttccccttttctcttggaaatcattcaaacccacaaaatccattttcagaaaagttggaaacaaacagaagccacagacttcaaaatatatgtaagggctgctcaaagacaactgaaattggttagaggccactcagcagtaagtgaagagaagatacatgcagaatgttgaaagatcagagtagtagcagatctcagaaagcctagcaaaaatatactttctaatggaagaatgttgataattatttaggacagataatggttacatgggggtttattatctattctctttacttttgtgtgtgtttgaaaattttcataatagtttcaaaatacagttcctgaaagtgaggtttcaccatgaaatataaatgttacatcctttgtttacaaccgtggatacggaaactttggagacaggttgaagctgatgacagaagcctcttagacctgatttgattcagagaagcagaggtggagctacacaagaattacacaaatgagccatatttgcaggaagcagtctgcctctgtggtgggaacaaaattcagctcatttagtgagaaataattttttaaaacggtgtagcctgaattcaaaaatcctgcaaaaaagaaaagaaaatcaaaatgaaaacttatcagtagaagaggacatatacctacttgaaaaattttgccaaggagcagatgagatgaaatgctttgctatgaactttttagaaatggggcagtcagaatgcaaagcaaaaatgaaagtagtcaagggctgataaaatgagtgataaactatgggctggcaggactcaggaaagaaagagatgaaaacgtgaagttggaaggagcacagggcagaagggccacatggaaaacacaaccaagggcacagaggacagaaactataaaagtaagcaaacgaaaatggaaataatgaaaaagttataaaggaacaaagagaaaatgacagatatagacgtcagggaaaggaaacctaacatttgcataattggagtctccaaggaagacaaccaaaatagtaaaaaaaattacagaaaaaaccataatggtttaataaaaccttacggaaatgaaagaatagttgaacatacatattgaaaaagttcatggtgtgtcaggaaaaactgacaaagattggtcaatctgagacatattctaatataattactgtactttagagataaagaaataattctttgggtagtcatacctcctccccacctcttgaaaagaaaaaagcaatattaagtcatttaaaataggaactaaatcaagatggcttccattttttcgtaacagcattccatatccaaagacaataacacactgatataagatcatcaaagaaagacagggtgacctgaggattatatgttcagccaagctcccctccaagcataaaggctacagataaccatttgtacatattcaggaactggagtaatgtgattccaatgagcctgtcttgaaggaactcctaggggattaacttcagctaacctgggaagttatctggagaaaccacaacagaaggactggttgtagttcgaggctgtagtcagctatgattgcaccactgcactctagcctggataatagagcaagactttgtctccaaaaaaaaaaaaaaaaaaaaagtgaatatggtcatattttaccttagactcaaaatgaaaacaaatggaagggttaaggtaataggtaagaatgtaaatatcatatatactgaaaatgtagagatggtaaaactgacaaaaattaggtggagaaggacaaaagagtatggaatatagagtaaggacaatgattgacatatgataaaataaatacagtggacagatattatttgaaattggcaagtcacataataagcatagaagcaagatacaagcaaacagtacaaaggtaaatgttaaggaagatattcttgtctaaaactgggtgatagggagaaggagggagataaaattggattattttattattgctacagtagggaccccataaatactatgcctaaagacatagaggactaagtattatcagaatatataaatgtatataaatactagaacagaagctgagatcattccagctatcagaactgtcacatgcaccactcccatccgccccacacacagaaagtggaccgtgcaaagattaaaaaaaaagaacctatgaaatgaggaaatgtgatataaatacattacatgactatataattaaacaagtaaaaccaagaccaaacatatctgtcttgtcaatacatgttacatcagtcacttactaattacaaaatttaaatcagatctcagagcaaaatctaactctcaaatgaaaagattgataaagtttgaaaataagattaagaaaatgtgtgccaggcaaatgcaaattaaatgacagcagaagtcatcatcttaatattagatgagagggtattcaggttcctaaaattaaatgagacaaaggatgacactttataatgctaaatggtacaattccaagatatgacacttatgagaatatctatgtgctaaatactacaacatcaatacttacaaaacacaacttacaggagatatgagaagcaatggaaacacactggttggtagggggagatttaattcccttctctcagttcatgtcagatcaaggagacaaaaatgtcagaggaggccaagtgtggtggctcaagcctgtaatctcagcactttgggaggccgaagcaggcagatcacttgaagtcaggagttcaagaccagcctggtcaatacagcgaaactctgtctctacaaaaaatacaaaaattagtcaggcgtggtggcgtgcacctgaaattctagctactcaggaggctgagacaggagaatcgcttgaacctgggaggtggacattgcagtgagccaagatggtgccactgcactccagcctgggtgacagagcaagattccatctcaaaaataaataaataaataaaataaaaaataaaaggtcagaggatgtagaaggcttggcatgattagtaacctgatttaacccagtagcctgaaaataaagactacacgtgtggcacttttactacaattgaccatgtaacaggccatgaagaaaactttaataaatttcagaaagtgacaataccaagaaaacattttctgattgtaatgcaataaaattagaaatttgtaacaagatcaaaagcccaaaaggcctcttctacctggaaaattaaaaaaccctctattttaacaattcttgggtgaaggagaaaatactaacagaaagcacagaacatctaggaaacagtgctaaaacactacatattagaacttactggttatagttaaagcagcgttcagagggaatttgtggccttaagaaattatgttaattacaaaaaagaaaactaattaagtatctaactctgggatcaaataataaagataaaactgtaattacagaatgccgggaaaatgaaaatgaaaacatgtatcaaaacaaatgaggcaatgccaagacattagtgagcagaggcaatttcatatgagtaactattttcattatctggaaaaagggagtaagtaaagcttcaattcaagaagctagaataatgataatgaaaagcccttaaaacagcaggacaaaaaaagagaaaaggaaaaggaaaagcagaaaaaattagaaaagagaaaattatagaattgaattgaaaaaaatcaaataattggcactttgattggaatgaatcaactaaaatagataactcttcagctagtctactttagagaagtagagaaaaccaagccaaaatccgcaatgaaaacagggacataacagcagagataattgggagttaggaattttagaaaaattctaagtatatttctatgttaatagatttgaaaatgtccttaaaatgagataatgtgaaggaaaagagaaacagaactgtctcaagaagcagcaaaaaatatgaaagaaacaggaaaattatcaaagaattactttcaaagagagagctggagccagggaattataaagtgaatttcctaaattttcaaagaataaataattcctgtgctatatgtagtatttcacagcagagaaaatattaaaatgtagaaaacctcgatttttatagagctagaattaccttaccatcaaaatctgataaagttcagccatatgtataaatatcatctatgacatgaatatatatgaaaaatcttagagaaataatagcaaatgaaacctaactaatattaaaataatgtcatgataaccgaatttgcttcattccaggaatataaaaagttcaacattaggaaatcatgaacagtattcatcatatcagtaggtaacattaacaaagattatttcagttggtgctgaaaagcattcaataaagtttaatatctattgatgatttataagatcaagtaacatattggaaataggagtttccttaatgttaaaaagaacatctctcaagctaacagccaacatccaacttcatgacttcagaaggtttctttactgtagaaaatgaacttgtatttctcaagaatgttcctaagtgcatttgtctggggagagagtccatggcttattgactgtagattactgaagcactctgtgactcaatataggttaaggtactgagtgaaacactagggcagtcctttcacaaagacaagacaagactcactgtgatcacgttcatgttatcactaacattggtccatatcttctaaccatttcaatgtcaacaaaaagaaacgggtcgttcattttagaaaggagaagacaaaattatccctgtgtctgactgacttgcttaccacctgaagagaaccaactgaaaaattagtagaaccatcaggagaacccagtaagatggcagcaactatttagaaaatctagtggaagaaagattcacattcatagtaccaacaaaagaagcttcatgaggaataaactcaacaataaacacataggctctgtatgaagatgcctataaatagtaaaagtcttgtgtaagttaagaatcagatcatgttcctgtattaaaatgttaatactataaagataacaattcccctgttgaaaattagttttaagtttaatgcaagcctaacaaaaattccaaagaaacattttgttgagaatggaacttaatgttttaaaatttcatctggaagaacatcaggtaacgaaacaggttatgaagccacagtgattaaaacatggtattggtgaaaaaacgcacagatcaatagagcagagaagagatcacaaacaaacaaaaggaggcgtgagcatttggcatatgacacaagtcatgggaaagggagaagaagtttaaacaaatatgatgtttagataattgcctaaccatttagcaaaaaataaattaaattcttgcctcacgctgggtaccaaattgaattgagtgttgaataatcttgctatgaagacattgtaagtataatttgagaggcagacactataaagaaaaagatctttagatgagatgatctagaaatttctggtatggctaaaatgcaaatcaaaatcacaatgagataccatctcacaccagttagaatggcgatcattaaaaagtcaggaaacaacaggtgctggagagaatgtggagaaataggaacacttttacactgttggtgggactgtaaactagatcaaccattgtggaagtcagtgtggtgattcctcagggatctagaactagaaataccatttgacccagccatctcattactgggtatatacccaaaggattataaaacatgctgctataaagacacatgcacacgtatgtttattgcggcactattcacaatagcaaagacttggaaccaacccaaatgtccaacaatgatagactggattaagaaaatgtggcacatatacaccatggaatactatgcagccataaagaatgatgagttcatgtcctttgtaggcacatggatgaagctggaaaccatcattctcagcaaactatcgcaaggacaaaaaaccaaacaccgcatgttctcactcataggtgggaattgaacaatgagatcacatggacacaggaaggggaacatcacactctggggcctgttgtggggtggggggaggggggagggatagcattaggagatacacctaatgttaaatgaagagttaatgggtgcagcacaccaacatggcacatgtatacatatgtaacagacctgcacattgtgcacatgtaccctaaaacttaaagtataataaaaaaataaaattaaaaaataataataataaaaaaaatttctgatatggctaaaaattgtaaatataaacataagataatcaaacgtaaccataaatataacataaacacaaacataaacataccataaataaaaatatcataaatataacataaacataactgaaaggcaagtgacagactgggacaaacatttgatagaccaaagtttaatatcctttatataccaagaagtctctcaaatcaccacagaacagaaaacaaacaccaacagatggaaaatgtacaaatgacaaggatgagcagaagaaatacaaatggctgataaacccgtgcaagtttctctattattattatctctattaaataaatgcaatttaaaattcagcataccatcttctatctatcaaattaacaaagctaaaaatgggtgaaagtgtacagtgatggtgaaaggctgggagtgtgggcacacttgaacactgtagataggagtatataaatccatacaatttttccagagagcaatttgtgcacatcagaggtcttaaaatgtgcatactccttgtccaggaattctttttctgggagcttataataaagatgaatttaaacaagtgcacaaaacacttggataggagattttaaaactcccacaccgtataagtggtttaaaaaaataatgttgatggctgggtctggtggctcatgccagtaatccctgcactttgggaggcggaggtgggaggattgcttgaggccaggagttggagaccagcctaggcaacatagcgagactccatctctacagaaaataaaaataataatattgaaaaaccgcaaaactaaatgttcatcatatcttgtgatacatttataaaattgaatatcatattgccattaggaaggaagagttttatagaagtatattttttgaccttgcaaagattttcatggtacatcattaggttaaaaaacaagttacaggccaggcacagtggctcacacctgtaatcccagcactttgggaggatgaagtgggaggattgcttgagtccaggagtttgagaccaacctgggcaacatggccagaactcatctctacaaaaataaaataaaataaaaaatataaaaattagctcagtgtggtggcacgcctgtactcccagctacaggaggctaaggtggggggatcatttgagcccaggagttcaaggctgcagtgagccatgattgcaccactgcactccaccctgggtgacagagtgagacttctcccctcacttgcaccccccatccacaaaacaagttacaagtttgtatcttttgagtccataattttggttaaaaaattatatatataaagaaaatattcaaaaggacatataccaaatgctgatcaaataactagttatttttgagaattagaatttaagacaatattaatttttaaaaatatttgcttatatttttctaaattttaataatgaacctgtgtcacttgcataattaaatatttattagaaaagatagaacttgaccttcaaggaagagacagaatttgagctgggcctaaatgagaaataatatttggaaagatgatttcagatatgacgaatttagcatgtatgttaacctgtttaatgttactgtttattaggtacattttatcagcataataaaaaacagcttgctgctttattaaatcctaagcaattctaaagcactgctttaacaaataataatcattggctgtttgagaagagacaagtaaatgaattgagctaacaagtttaaagtgatgctccaaagatacacttggattgatatttgataccattgtcattggatatcctgtatgtgaacatttttacttgaaatgctgacctgttaattttccagacatctatcacagtcttcaaataaaatgtcggtccaccctttgctcattcataatcttgttcttttaaaaaatgtactgcccatgtctctgatgactctcaggtacttacaatattttattgaccagaaaaccctattccctaacggagctgaacaaatatctttccttttgctcccttcccctggaattttctgtccatctcctcctctgttcctttctggctccctctgtgacctctccatctctccaaccctgccctcttctttgccttcattcctttattttgtttttggtcactttccctccttttcttcttctctcttccttctctctctttattcactctcacactgtcatgtttcccctccttctcttgtttcctttcctttgctgttgttctactttctttctgtctcttgtcccctcctctaatccccatgtgtggcaggtctatgacacacagctggagaatgtggaggcctttgagggcctgtctgacttttgtaacaccttcaagctgtaccggggcaagacgcaggaggagacagaagatccatctgtgattggtgaatttaaggtaaatcctcgaagacgtccctaacccaggtgggcctaagactgtggtgttggagcaataagtgaaggggaggggtcgtacctacactggtgaccctggtgctgatgttggtgaccacatgggtaatggaggtggtgatggtgatgccgctgacgcagaatctgactggtgatgggatggtgttgggcttggtgatctcagtggtggtgactctggtagagatgagagtggtggtcatgatggtgattgtgtcagtgacaattgtatttgtttttagtctgttttcatgctgctgataaagacacattcaagactgggaagaaaaagaggtttaattgaacttagagttccacatggctggcaaggcctcagaatcatggcgggaggggaaaggcagttcttatatggtggcagcaagagaaaatgaggaagaagcaaaagcagaatcccctgataaacccatcagatcttgtgagacttattcaccaccacgagaatagcacgagaaagactggcccccatgattcagttacctcctcctgggtccctcccccaacacgtgggaattctgggagatacaattggagttgagatttgagtgggaatgcagccaaaccatatcattctgcccctggcccctccaaatctcatgttctcacatttcaaaaccaattatgccttccttagagtcccccaaagttaactcatttcagcattaacccaaaagtccacagtccaaagtctcatctgagacaaggcatagtcccttccacctatgagcctgtaatatcaaaagtaaggtagttacttcctagatacaatgggggtgcaggtattgggtaaatacagccattccaaatgggagaaattggccaaaaccaaaaggttacagggctcatgcaagtctgaaatccagtgggacagtcatattttaaagctccaaaatgatctcctttgactccaggtctcacatctaggtcatgctgacgcaaaaggtaggttcccatggtcttgggcagctctgcctctgtggctttgcagggtacaggctccctcctggctgctttcacaggctggcgttgagtgtctgaggcttttccaggttcacggtacaagctgttggtggatttaccattctagggtctggaggaaggtggccctcttctcacagctctactagcagtgccccagatgtggggcatcagagcccccacatttcccttctgcattgccctagcagaggttctccataagggccccacccctgcagcaaacttttgcctgggcatccaggtgtttccatacctcttctgaaatctgggtggaggttcccaaacctcagttcttgacttccgtgcacccacaggctcaataccacgtggaagctgccaaggcttggggattccaccctgtgaagccacagcccaagctgtacattggcccctttcagccacggttggagcagctgggacacagagcaccaagtccctgggctgcacatagcacagggaccctgggcccggcccacaaaaccactttttcctcctgggcttctgggcctgtgatgggaggggctgctgtgaagatctctgatatggcctggagacattttccccatggtcttggggattaacattaggctccttgctacttatgcaaatttctgcagctggcttgaatttcttctcaaaaaatgggtttttcttttcttctgcatcatcaggctgcacattttctgaacttttatgctctgtttcccttttaaaacagaatgcttttaacagcacccaagtcaacttttgaatgctttgctgcttagaaatttcttctgccagataccctaaatcgtctctctccagttcaaagctccacagatttctagggcagaggcaagatgccaccagtctctttgctaaaacataacaagagtcacctttgctccagttcccaacaagttccccatctctatctgagaccacctcagcctggattttattgtccatattgctatcagcattttgggcaaagccattaaacaagtctttaggaagttccatagttttccacgttttcccatcttattctgagccctccaaactgttccaacctctgcctgttagccagttccaaagtcgcttccacatttttgggtatcttttcatcaacaccccactcctggtaccaatttactgtattattctgttttcacactgctgatgaagacatacccaagacttggaagaaaaagaggtttaattgaacttacagttccacatggctggcaaggcctcagaatcatggcaggaggtgaaaggcagttcttacatggtagtggcaagagaaaaggaggaggaagcaaaagcagaaacacctgataaacccaacagatctcatgatacttatttactatcacgagaatagcatgggaaagactggcccccatgattcaattatctcctcctgggtccctcccacaacatgtgggaattctgggagatacaattcaagttgagatttgggtggggacacagccaaaccatatcaacaatgatgataaaaatgaaaattaacccttccttcttttcagggcctcttcaaaatttatcccctcccagaagacccagccatccccatgcccccaagacagttccaccagctggccgcccagggaccccaggagtgcttggtccgtatctacattgtccgagcatttggcctgcagcccaaggaccccaatggaaaggtaactttcctagagccctcacctcccccagagtagcaggctcaggtacaagtggcctatagaacctggacacaaactctgcctcagggagttcatagtaggttgggaaacagacaaacacacaaaactgagaggtgcctggatggagttgtgttaaggaccaagtgctctagaaggtcagggaaggccagtgtcagtacaggactttgggaaaatggggaaggcttcctggaaggaataggactcttaggatagatgagattttgataggctgggagggagaagaaaatagtgttttaagaggggccaaaagcataggcaaaggtttgaaagaaaattgcttaatgtgtgtctagaacaagaataaagcagaaagataagtaaggctgagggtataggttgggactctcaatggttaatggggaggagtgatgggggaaaggagcagcgttagtgactgctatgcctagtcatggcagagtcccaggtaaaagggaatgctggtaacactcacccggtctttatttaaaattttgatattttgttcatcatggactattgacactgattttaatttttaaaatatttcattaaagtactgtttatcttaataactattttggcccttccttacattttgtgcccaagataagtgcgtgagctgtctccctctagtcattgcctgagatggagaggggagatttgaaggaggaaaggagtctggagttatggggaggtgacagaggtgggaggcagagtaatgttgggaagagaaagaaagaggaaagaagagaggcaggggtggggcctgatttgcctttacaggcatgaggctagggtcccctcttgtctcctgaggcaggtttaggcccagcatgtgtccttcaggtggtgggcggaggcctggtatcccaccctgtagcctcacctttcaagggacagaatggagcagttctcagcctaggcaccactgacggcctccaaggtgtggtcatggccagtgggttggtttatatgcttgaagccttcctgatgctagactaaccctgggcactctgcagccccagctgctgggtcgctggctgaggggtgctgctgcttccaggaagcatggagggagacctccctgggctagcctaggctgacataggctgaccacccctctctcattccatatgcttaagcagaggtcacagagaggaccccagcctggtctcgtcatgtgtgtaatgcagactgttgtgtttctgataagggcctggcctctcccaatggagcagtagattgggagtgtgaaggactcaggtgccccattcccacggctggagccaagaccagaagcccatgtcagggtccaagtggagtggtgtggtgtgtgggagggggccctgtcttggcaggacacagcccacatctcaacttcctgatggctgctccctcatcccatccagaggcaaggcactcatgaagcctcaaagacaggtttggaaagtgttttcacagaagtgttttgtctcctcctccagtgtgatccttacatcaagatctccatagggaagaaatcagtgagtgaccaggataactacatcccctgcacgctggagcccgtatttggaaagtaaattggggcatcttgggtcttggggtggaggagccagacaggataacccacagtctagtgggggagatgtgactggcactgtgaagtccgtatctcttggagcaaaactgtattccttaaatcttgcatgtctatgggggcatagcctcagttagcccttctttagctgctaaagacttgatcccaacagaagctcctagttaaatgctaaacaattacgtctaagatcagaaatctacatggcttgagctcaggagtttgagaccagtctgggcaacatagcaagaccccatctctacaaaaaataaaaaacttagccaggcatggtagtgcatgcctgtggttccagatacttgggaggctgaggtgggaggatcccttgagcctaggagtttgagcttacagtgatctgtgatcaaactactgcactccagcctgggtgacagagcaaaaccctgtctcaaaaaaaaaaaaaaaaaaaaagaaagaaaaagtagaaatctgtgtgtaagctcagaagatgcatttgctaattcttttttttttttaagataaacttttactttggaataattttagatttactaaacagttacagagacagtgcataatttccacttactcaatttcccccactggtaaccccttactcaatttcccccactggtatcatcttacctaaccatgggacatttgtcaaaatgaagaaatcatcattggtgcattacgtttaaccaaactagacttttttttaaaggatttcatgttttcccactaatgtcctcttactaatgtctcaggatccaatctgttatacgacattgcatttagtaattaattctctgtaagtgtcccacatgtgtttgtagcaagagctagaggaagaatgtagacccaagatagtaaaatgattcctgaaatctgagaacaaggaaaggaagaatcaatgcccattgcatgggagtaattcctaggcatcctgaattgctgtttggatgtgagcttgtttaggccagagaggggaggatgcagagggagggtggcagctatttctctcgcacctgcagaagacacctactgttccgatgtcatcaagtcacatattgcacttataaaccggggtctgttgagttagttgtggtcactcaccctgcagtgaggacccagtctccttggggaaatgcagcttttgaaggtgaaccagccctggccagtgatgagctcccaccaagcagggattggagggaagtggtaggtgggagagaggaactctgtatgagttccaggggctggcgagctccaggggctggcgcaggacctcaggctaatgctgatggggcagtgggcagggcctgttccacagtgggtgggcgtgtgtcaggactcaggggagataggggagccagtgcaggaacacacccctcccatgcctgtttccccatctccccccaatcctgggcaagctggtctgcctggtgctttaagcctccttcagatcacaacagaaacccttccattctataacccatgtgtcagacgaacacaacgcatgaggtggtttttgtcaccatgtattccatggcgttaccttctcctttcccctgaggaaactgacaggcaggtgacttttctgctcacattgagctcagccactttaactcacgaacccagtctcaggccataacccactgcccatttgtatggaatcccgagctccctgatggctctaggggagtgtgtcccctctttggatgcagttgtgtgtgtatatgtgtgtatgtatgtgtgtgtatgtgtgtatatgtgcacatatgtgcgtgcgtgtgtatgtatttgtgtgtatgtgtgtgtatatgtgtatgtgtgtctgtgttcgtgtgtctgtgtggtgtgtgtatatatgtgtgcatgtgtatttgtgtgtatacatgtgtgtaggtgtatgcgtctgtgtgtgtctgtgtgtctgtgtggcatgtgtgtattttgtgtgtatgtgtctctgtgtccatgtgtccgtgtatgtgtgtggtgtgtgtatatgtatgtgtgttgtatgtatgtgtgtgtatgtgtatttgtatatgtgtgcgtgtatgtgcatgtgtatttgtatgtgtgtgtgtatgtgtgtttgtgtctgtgtgtctgtgtgtggtgtgtgtatatgtgcatttgtgtatatgtgtgtgtatgtgtgtgtgtctgtgtccatgtatgtgtgtgtgtgtacgtgagtacatttgtgtgcctgtgtgtgtatatgtgtgcacgtatgtgcatgtgtgtgtgtgtgcatatttgtgtgtgtatgtctgtgtccatgtgtctgcatatgtgtgtggtgtgtgtatatttgtgtatgtttacgtgtgtgtgtgtgtgtgcgcgcacgcgcgtggtgtagggaaggaagggccctgccttcctcccttcctggtccagtgtttctcccttcctgctctggctgacctctgaggttctgactcctgcagtgtctgggctggggagagggcccgtctcatgtgcccaccaccgctgtcatccgggtactctctggaccacggatgttgaaagccgacttattttcctgtgggtgctttccagaggttcctcagagagccccccgtgagccctcccactgcactttctgggatatggcagatgctgcgtccctttagctgctgtccccagcccctggttctcagatggtcaactccacaatctctcgctgctacaaccctctgggggtctcacagggcaggattcagagcagttccagtctggcctcagagtggtttcttctcctcccaggaagtccttgtgttccttgcccaggcatgggccagagtgcagctcctcccaaatgtggcccctgccctccttctccatgccacaagttgcttaagtttccctgagcatgcaccaggtgccaggcttgtgtctctcacctgcagggagctcattttagggggagaagggagaatacctctccctttgatgcacatggtagatggagttctcagatacagcaagagctctcgccagagaaatcttttcacaaattctccctccatcccatcccagaagtggatgtgaagagtccagaaagcaggtcccaggcctggagtttccagtcatcggtaaattccaaagctctggccccttgctctggagtaccagtcgtcggtaaattggagtcccccaatttaccgggagtcctccctggactggaggtaccagtcgtcggtaaattccaaagctctggcccctggctctggagtttcacatctcttgcatctgttgtctcctggtgtcgtggtcaaagcttcagttttaatgtgcatttccaattcattctttcggtctgtggtccatcaggcaggcacttgccttatgcccagcacagtttatttgggaaagtcctgtcccccttccccctacacacacactcaggcccagtacagcagtgctgtgggtggttgggcctgtaagatctgtagggggcccaaggaaagaagactccctggggtagtttcgagctcttgtcctgccctgcctgtcccttgggtgccccgtgttggctgacatcgggaatctgcccctcctgcaggatgttcgagctgacctgcactctgcctctggagaaggacctaaagatcactctctatgactatgacctcctctccaaggacgaaaagatcggtgagacggtcgtcgacctggagaacaggctgctgtccaagtttggggctcgctgtggactcccacagacctactgtgtgtacgtggatgggggctggctgcctgcttctctgacaacacaccacccctgtcttctctgacaacacaccaccactgagcacttactgtgtgccagccctgggcttagcacttcctaggcattctctcattgagtccaatgggagtcctatccccactccacagatgaagaaactgaagcccagagatgttattgcttgtaagtggtggaattaggatttgaaccaagaacctggctcatcacattgttataatccagttatctgtaatgcacatagaaggcctagagagggctaggtacctggaaagggagagagggaaggaaggcaggaaagaagcaggggaaacagatgagaggacatgtgtgctgcaactgggcccgaaggggaattttgtgatggtttatgtcaggggaatgcatgtgaggactgcacccctcttcccaccatctcaagtcttctctgggtctgattatctaactctggaaattgaaaacatttaagttgcaattccgtacttaaatgagtccttttctctctgagcctccatttctccatctgtaaaatggggatgcccagtcatggtgagcaatcagatgggacacccactgtaaaagcaaggagtgggcaatgctgtacatgggggtacaccagtccctgcatgcccctctaccctcatgagtgtccttgaagcatctcatctatgtcttgtgcttgctcctcagctctggaccgaaccagtggcgggaccagctccgcccctcccagctcctccacctcttctgccagcagcatagagtcaaggcacctgtgtaccggacagaccgtgtaatgtttcaggataaagaatattccattgaagagataggtgagctgccacatgaccccaaaccatggtgggctctcgctgtatccctccctctctcatcagaccctctgctaccataaaagacccaagcggacataacccacagcagcaggctgtgggtctctccagggcagcacagatgggctccacttgcacttggtactttgaggatcagtactgacctgtgatgccactgtgaaaattagaggtcagggcacagccagggtcagagtgcagtccaaggccaggttggggcccatccgagggcaagatcagaggtgagtctgaagccagtgtcagggtcagagttaggctcagtctctttctggcattggctggtctgactctggttggagtttggggtacagtccacttctcagaaacagttttctacttgaattgcaccagcctggcagcttgaccctgatggtatcttccaagctccccactgacagcccatgcatctaaaggatcccaaggcaggcaggccttgtagtgcccccagtcctgcccagggtcctgcccagctctcctggctgagaatcccgccacatgctctccgtgtgtctgagatgcccgcaggcctgcatcacccactcagagcagctcagactccccagaggtgtttacaggcccagctggccccttgcctcctggttgcttcagagatgtttgatgtcagagctggtgccaaggttataaaagggaaatgatggctttgatgcccccatcccccaccccctcctccttctcattctgttttcctgactctcccaggtcatggctgagccaggctcggccataaggcgcccccagccctgccccccttcattcccttttcccatagaatgagcatctgttttcgggggagtctcatttccttctactagtctgtgagcaactttagcacagggccatggctcatggtcataaagtcataggaaacaaaagccagaaagctagagatggtgaggtccaacatctgcctgcttttacagatgaggctggtaagaccaagagtggtgaacgacctgcccaacgtcacccaaccagctaggggcagagccaggttcctggccctgtgtgccttctgaggtgcatgcctcttcctttgaggcccctactgaaatgggcagggcaggtctgatgggtgaacacatgtgtgtgtacatataggtgtgcatgagcacacctgggtacatgtacagatgtgtgtgtccaccatcagctcccaaagccaaggcctttgacatagtgggctccaagttcatgttgttggatggttggccaggcttctctgggtcaggaataccccatgtcttctccccacctgtagcaccagtttttgacccattccctagcagggaggagctgtacctgggacgcacctggggacaggcacctaggttcatgcctagtcacgcacctttcctaagtgagcatgtgatctcagctgctctgctgctagttgtgtggcttctctgtgcctcagatttctcttctataaaatggggataataacagcactcagcttctaggatcctcatgaagactaaatatgttaatagcttgaagaacagtgtgtggcacgtggttcctgctctggaagtgtttgctgttattgctattattttagctactgctaatagtagaacaacttaagtgaacgagagcataatactaacagcactaagatgccaaatctaggagtaaaggttgctgaggcttagagttgggagcagtcagggagagcttcctggaagaagtaggctttggagacaggaggatttgtatggtggaaaataggaataaaaactatagaacaggcttggtagaaatgatggcaatggggaatctggattttaagcctggagctagtggacagcaagatttcccctatcaaaagtgagacatgaggaccagaaaaagtgcatctgtgctgggggtgaggctgcgggggttagagcttcttatgactcttaggcagccctgctcagcctgttcactgggcagccccattatctctcgcttccccagctcctgcaacttttttgtcttctctctggggcagaggctggcaggatcccaaacccacacctgggcccagtggaggagcgtctggctctgcatgtgcttcagcagcagggcctggtcccggagcacgtggagtcacggcccctctacagccccctgcagccagacatcgagcaggtaggaccttgacccttgggtcccagagtcctcgaactccagaaagccccaaccccagggacaacatggatatcccagaggagccagtgggtcccttgagatttggtcaatccttccttgacccatttcttcacagtctgagtgcggccatggttggcctgggaggggatctttaggtcctggcttcctctggctgcctccatccctcagggcctgcgaaacgaggctgagcttctcccctcacccctgtaggcctggcctccgacctctccttgtcatcctgaagcctctctgtttcagcctgacttcaggttggattcccccatccaaccactatctgtcagtgactcagtctcagatgcccggccctgtgctgggtggctgtggggtatgcagccagggtggccctggcatcctatgaccaaatgacaaagccacccacagagagcagtcctcagtgggaggggaatcctcccacgctgaagggcggggaccacagagacagcagccttgggatggtgacagggagggcttcctggaagaggtgagctcagagctgggttttggaagaggagaaggggagacaaggttataggcaaagagaaaggccaaagtgagccatgaggatgcctttgtgaatgccagaggacattacctctgttgtttggaactgagctctctctccacctaggtggtttggctaccggcctccccaaagtggcacaacaggtgtggaaacttcagctctttcatcttctagttctgtgaccctgcagaagtgacttaattgaattacttcaattcctgctccttctgctctaagatgagacaaattcacacctcgcttgcagagagggaggaggataaggggtgggcagggagagtgatgtcctgccatggaagccttctgagccctccataactgaacggtgctctttgacacgccacgactgtgcacatgccattcccctggctgccaagactcagctcagccaccaccatctctgagaagcccaccctgacccttgacccccaggcacaggcccaagtcagaggcctgtggggcagtggtcacctctgcggttgaccctgtagtcccctgtttagggcagtgaggctttctctggaagggcctgggtttctctgttctgtgccctcagcatctggcccagagcaggtgcttggtaacagctggttaaatgagaagggtggggagagaacggaccctgtctccgcaggggaagctgcagatgtgggtcgacctatttccgaaggccctggggcggcctggacctcccttcaacatcaccccacggagagccagaaggtgacttgcccagccacaggctctgagctgggctgaggggtgggggcgttgcagcctgctgtgggcgggactaggcggttgctcttttctgccgggcttcaggctatttgggccatggaatacagttctcgtttgggcctgggccagtgtccagccaggcaggcatcgagtcctcttggaccagtctgcttcttggcttcttggcttcttaaggccttcccatcctttggtaggaaatctaggtggattagagtgatacctttccccaggtttttcctgcgttgtattatctggaataccagagatgtgatcctggatgacctgagcctcacgggggagaagatgagcgacatttatgtgaaagggtagggagccagcgtcctcttgcctgtccagcttcccgcagctcccgtgctccctctgggttgtgcacagcacggggggctctggctcagggaagggaagaacaaacaaacttccaacgagggctcctgggggtggtccctgcctttggggaaatcgctctcccaccagatttctttttctgcactgaactttgggttgaacttacaagtttagtggctgggaagttagaatgttttcaaatttatggcacattttgtacatcgtgccgatttcctgggaattctttttgcgataagctcatttaccttcttaactccttgtctgcctaagttgacgatgtatatactgtgttggaaatcttaatgagaactattctctaaaaacatgtatgtctagttggatgattggctttgaagaacacaagcaaaagacagacgtgcattatcgttccctgggaggtgaaggcaacttcaactggaggttcattttccccttcgactacctgccagctgagcaagtctgtaccattgccaagaaggtcagtgtccttccgattccctgtggtgccagcaccagggcttctaaagttagcctgacctgaccaccacgtccctgcctggcaactgtcacaatctcactgctgccccaccatgttggagctaccactgccatctccacatggccaccacctccactgtcccagcactgccagtgtcaccaccactgctgtctcagcattgtgtgatggcctctgtcccatcacagccaatgtcaccgtggctgctgttccatcactactggtgttatcacaactgttgcctcctcactgccaaatgtcaccaccactgttctgtcattcatggcactaccgtggtcccacccctgctgtcattacccccaaagccacctccaccatctctgcatccaccccttttccactctcttccaccatctttcccatccccagccctgccgccaccccatggccacctcatgatcacacagtgccatatccatcatttgcagctaaatccagatcccaaagtcactgcctccctccctacctcagacaagttaagcagcaggaaggaccatggggtctgagtgggtagagtagggacacccagcatggccttcaaaagggcagtggggcagaccccatgggggagcttcccaagaaggccagtctggcctatagatcatggtgtccacaggattgggagttgcttggctaagtctttctcatatcccattttccacatctgtgcctatggtcaccgtccaagctaggtcacagtccaagtgtgcctgcaaggcccacagccatcaccctcctctctccactcccacctctcactacaggccaaaggcacctagggagacctggcttgcatcagccagaggggaggctggatttggggacctcggtctctgtgtctcagcatctgctagtttaggtctcatctggggcgtcaactttttacccctgaactaggcagaactcgaggacagccagcctcttcctggtaggaccaggcctgccctcagagagcagcccccagagcacagaatgggtgctgagggcagtggagacttcagggctatgctggttggaggcagaggggtctctgctgtagcttctggccatccttgtcccacccggcattaaattccaccctgaggtgctctccaactcaagggggtaaatgcctctctggcatctagattctgctggcccgatttccttccagaggtggctcaaggctttaagcctcaaagctcctatgactccttgtctcctgaaaggaaggggatatatgacgcgttccagtgcctgcattttcttgattctcttcattacatcccctctgcatggcccttcccagcctaacatgcaggatcatctgcacattagagaaagcaaaatgttccgcggaacattctgaaaccatgaaacaaaagaaaacatggattcaacagggttaagtggatccctttaccgagccattgctgtggagtgactggcagaaagcagaattgagcaacagggttctgggaggtcaaggaaagcatgggccgtttgcaggttgagcctcatttgctgctgttcagtgtgcttccctgacatgagcctgtttccatcagaaagccaaggttgcatctgccccaagacacagcactgccccagccagctctgctgcagacagagggagagggggcctgggagtggagagggagggctgcgccccccgtggcacccccagggctcacctacaagggctggagactgagaccgagaggaatgggaggtgggacagccccttcctcatgacaggtggagatgtggattaggagtggctgttttgtctctgaagtaagaggagagatgatctggtactggggcaggtgacttgagaccagtggaaaaggctggaaagagctgctatgagtgacagtgagggagggacacagagagatggggagggaatgtgactggcagcacagagagggttacccggcagttctggggacccagttgtggttgctgattaagaatttggggtggctccattctggcaatgttgtggttttgtctctgcatcatagggcctggtcaggaggaaggaagaaggggagagtggggccaacccgtgggcgagttccagaggaagacaggggtcgaggatatggaagggactgcctgatggccaagagggtcttggtcagacttgggagaatgagaagcccacaggggagcaggggtggcgaggaggaagagaggtcagagagtggaaggagaggctcactgggagggaaggccagaggggaagggacgttctccgtgatgccagactctggggagaaggtggctggaaggaggggcggagaaggtcagaagaggaggctgagaaacagaaacagaggccacgtggctctgaagtcaaccagaggtgggagacagaaactggctcggccgaaggcggagacagaaactggcttggccgaaggcagagccagagggtccctcttggagtgaagggaccctgggaggcaggcagagcagtggccacagtggggcaccagttagctgggttgggctgaaggatcgagtctggatgggttcgtgcaggggcactgcacagcctctgggctccctgggcctgccacggagccagccctctgccgtggggttcagggcctctggcaggcaggccctccagggaccccattaaccagacgagactgtcgtaaagtacaaggtctcctttcatccggcggctttgaaccaccactggttgccccggccaggctccccacctggagcccagcacaccctgcacgtcaggcacccaccctgcaaataaacagctagtaaaagcgcccaggccaggagcataatgagcgcctgggacctgggggggttcattccccaggctggagccccagcccagctgctcccaccaggggccgtttgaacctctggctcattaccgagcccataaaccaagctggccagaggaatggaggctgctggcgggccatgcaggcgggcctgcggagctggccataaaagctcgccagaggagggaggcacctgcagaagggctggggcccggaaaaggggggaggcaccagacagagggctggaggtgaggggccagctggagacctgagccccttccccaacccaggcagcagtccaggccgtggctgggtgctttgcacggggactagtcctcacggggcaggggtcatggtcttcggttcgggagctcactgggatttccgtggccaacctctgaggctggggtggccacacagcaggccctggctggacagcaagggtgggtttaccaggcatttggtggagcttttcccctgcagagttgggtccaggcccttgctctgacccggcactcaggacttggcacccaccatctgcagggtggtcacactgtttcctgtccttgccactcacccaggggagagttatagtgagaaaacagagaacaagactgcgctggaaagccctagtgacagtgctgtgggttgagtgtggctggactgaggggtgctccccggcctccgcatgtgcagtcccacaccgctcagttgctccatgaagcctcagtgggaggaagcccaagatgaccttgttccaggcgagctggtctgagggaggtggggtggggagagaagggcccctcctctcctttcagcaggagacggaacttcccagcacttcaggctttggctttgccctgggtcaagctcttggagtgaagttgggtggggtggagagggaggagctggggtctagattccagtgccagctccttacagcagcgtgctgggagatccttctatgacagccagggtagggtggggtccctcagggtctcagttaccccaccctgaccctgagatgccaggtacagagcaaggtttaaggtagagagcaggactctggaacccagctgccagggtttgagtccagcttgccacttcctagctatgtggtcttggacaaattacttgctttggtctcctccactgtaaagatagtatctcctttacaggtggttggaaggataaatgagttcatagcagtagagggccaacgcataggaagcactatattaatgttattattattagtggtcagacctcaggcacattcctttaacttctccaagcctcaccttcatcatctgtaaaatgggagtgataaccttgacttacagagttgggaggattaatggagccatcttatgtgaactgagcctgcacggtgcccttttgggcccttgaacactgccttctgggatctgtccttcccagtcttcccacaggacctggctctggcaggtcccttggggacatcctactcctctgcctcctccaggcagccttccaggctggaagggaacactgcctctctctaaccttgcttccttgcatccttctctgttcctcttccgggtcaggatgccttctggaggctggacaagactgagagcaaaatcccagcacgagtggtgttccagatctgggacaatgacaagttctcctttgatgattttctgggtaagcgctattgctagaatcccattctgcacatgggggctgccccagaacccacactgtgtgtttatgccactgttggacccttggggaagcctagcaggaggagtgatcccactttctgctttcagggagctcagggtcatgtgtccccagtgttaagtgaggtgtatgacacacagcagtgtcagagtgattggtggccactgagggtgggcctgtcagtagaggtggcactgaacactgggccatgttggatgatgggactcagatatgtaagtaagcgagggacgcaagtgtgtgctgcctgtcgccagctgtctggcctcacatttgacacagactgagccctgtgagtgagggtctcaagtcagtcttcatccttgtgcctgtgtgaccgactgagtgaacaaacccaggctctatccccattacccccagacagggttctagtgggaagggctgtgatgaaatctgggactggggagcagggaggctgggttgaatggaaggtggtgatggtggccttgtagggttaggatatggggacaaggaggaagacattgtatggggcctgcacgctcatctgtgagagcagtgagttcaagatagccctgtcatggctataaaggttaactctggaaaatgtggtctatccatacaatgggagagtattcagccatgaaagcaatgaaatactgatacatactacactgtaggtgaacctgaaaacatgccaggtgaaagcagccagacacaaaaggtcaaatattatatggcttcatgtatatgaaatgtccataataggcaaatccatagagacggaaaataggttagtggttgctagggattgggggaggggggatggggagtgactgtgatgggtaagaggtttctttttgcggtgatggaaaggttctggaattagatggtggtgaaggttgcacaactctgtgaatatactcaaaggcactgatttgtacacttaaagtggttaaagtggtgcatttatgtgaggtggattttaccttgattaaaaaataaagcgagcttgtgaaaacggcaacccaggaagtcaggatccctggtttctagatccattctgccacttgggagcagggtggcctggagccctcttggggtagcccttgactggagaaggtgagtcgttcttagctgagccctggggcccctgcaggggatattctgaggcgcggcttccggcagtggggagaaggctgcctgttcacttgactgttcccccgccctgcgcacctggcctggccaaatgcccagagaactttgttataaaagcatcaggtgcaaaaagcgtggcaccaagtttgacttctattattttacttattattttgtacataattcctgtagaggaattagaaaatgcaggtaaggaattagaaaatgcaggtaagcaatgcttcctccccaccttaatctcaccacccaatttctactaacattttggcatgtattattgtattatatattatttgagacttaaacaaacataagtattttatatatgtatttatatatacacatgtacatgcatacatatataatatatacatatattcatatgtatatgaatggatttctattacacagactgttttatatcctgatttttgaaaaacctaatattccaagaacatcctttctggtcagtaggtatcgatctgcatttatatctccatcatcacacttaatgcctgcctatgttttgtcatagacgtgggccctgttttgattaatcctctcctggtgggtattcaggtcatctccaggtttcccaatgtgagtaacaccctcggcatatgcacatccttcgatcctttgtgcatatctttccttaactctgagaagtagatatgtctttgtacattttaatggcttttgaaacattttgttcagttgccctctagaaaggttttacttgtttatactcccacctgtgccctgtttgtacagggtgccattttccctaaacttttgctaccactgtacattaaaaaaaaattgccaataagatatttcctttttatttgcattttttattgcatttaaggtagaactttaaaatatatttattatccgtattgtggaattttcttcatggttttgcaatattcatcttttattattgattttcagagccttttatgtattaagaatacattgcaaataatttctcccaatttttcttatgctttaaaatttttatggagactttttttcttacagactttgtgaatttatggcatcaatctttcctttatgaagtgaggctttagaaaattagtttttaaaagaaaaacaaaaaaaaaaccctgtgttttttactgactgagtaaatcatgttcaaagtaaagttaaacagactcatcctttgttttaaaaaataaaaccattaacgaatactagcttttatatccatgaaatttttcttttccaccttcataatttgttttctaattacataacttgtgtcttttgaatatttattactttttaattttaaaggtaatggttaagcacctataagctcaccatccagatagcctgtgtttccttacagtcttttatgtagatcatgctgagataatgtgtgtgtatgtgtgtgtgtgtgtgtgtgtggtttaatattctgacatttgcttaatatattggcaccatatttcaaatagaaaataaacattcattcatctgcactggagggatggagaaatatatgggtgggtggagcatagatgaatgccgatatacagttgaataagtggacagacaggtggaataataacctgattaatggatagatatagtgcttaacaaatggtagctatagaggaatgtggatagttaggtcaaagcagacgcacagatggaaggacggattgataaatggatgagtggaaagaaagaaaactagaaaaagagttatatttaatgttcggttatagtaactatgcattctacactgaaaaaaattgaaacacctttgcatggtgtttgagaatttctttaatttggcttcagaaaataatttttctattgatctctcttaatccctttggcaacctatgctccaatcccattgactttatcagattatgattagattaggcgaaaccacatgaaattgctgtttaaatgggtcaaagatagttaaatacaagaattttcatatggttcaacctaatagctgaaggtatcctgggagatgatagataaaagggatgattagataaaacaataaaaaaagatggctgcttggataactaggtggtagatgaaaaagactgttggatgaaccacagtgaggtaccacttcacacctactaagataatagtaataataataaaccagaatatagcaagtgttttgaggatgtggagaaattgctggtgtgctgggacattggtggtttgagtgtaaaatgattcggctgctgtggaaaactgtttggcagttccttgaaaagctgatcatagaattgctaatgaacaaagaatcctactccaggtgtgtgtgtaccccaaagaattgaaaacagggactcagacatttgtgtgctaacgttcactgcaacattattcataatatgaagttaaaagatgggaacacctcaagtgtccatcaacagatgaatgaatgaacaaagtgtggtacaggttaaatataacttatctgaaatgcttggaacagaagtgtttcagatttctgatgctttttggattttggaataattgcatatacttaataagatatctttgggataggacccaaatctaaatacaaaatttttttcatatatactttgtaagcatagcctgaagggaattttatagaatatttaagataattttatgcatgaaacaaagtttaagtacgtatgtgtggagttttccacttgtagcattatgttggcaatcagaaactttcagactttggagcatttcaaatttcagattttcagattatgcatgttcaacccgtatatgcctagaatggaatcttactcaaccataaaaaaaatacagattaaaaaaacactactgatatatacaacaaggatgaaccctgaaaacattatggaaatcaaaataagccagacacaaaagaacaaatattgtatgattccacttatatgaaatatctagaatagacaaattcatagagacagaaagtagactagaggttactggggcgaaggggagggaggaatggggagttattgcttaatgggtgcagagtttttgtttgggggatggaaaagttttagaaatagtagtgatggttgtacagcattgtggctgtaattaaagccactgaattgtacacttaacatggttaaaataacaaatttcatgttatatgtattttaccatgataaaaataattaaaaaaaaattgatgtatggctgtttatagacggtgtatgaatggatttgtacatagatgagtaattgaagaggtgggtggctttgttaagggtgagtaaataggagtggatgaacatgcatatgaacgcatgagtagatgaatgggaagctgtatagatggaatgggagacaatgggtagggaggtggagagttcgtgagattttacctgtggctcggccatggatagaagctggtgacagaggtgactgagtttttcctgaacctgccctgcctaagggtggctacaggctggcagtgatcgagaaacccttggccaaaaactacctctctgttgcaggctccctgcagctcgatctcaaccgcatgcccaagccagccaagacagccaagaagtgctccttggaccagctggatgatgctttccacccagaatggtttgtgtccctttttgagcagaaaacagtgaagggctggtggccctgtgtagcagaagagggtgagaagaaaatactggcggtaagtctacttcctccagccccagtggagggcatgggggaagcttcttccatagaaattgtcagaaaatacgtcatcagaaaatacatgcttactgttcctcctcctttctccccctctcctgcccccatcccccctctctctctattttccaaggcattctccctctttcctcccaattcccggtcgccttctcctttgcggctcacatcccaggggaagcctatttaaaccaaaagattactctgtttatactctactcattggctttaatagtgacctgtgtcctgggttccctctgatctggacttcctgggtgaatgggcgggggtcatgcctctcccatttgagcaggaccctccaagggaccatccttattctgctctctgagaggtctgcttagaggggtgactggagggcccgagagaaccgtccttcccctgagtccacagcagccatggagaggaagttaatccctgaaagtttacttagaaatttcaggcagccagccaaccctgaaagtggtccttgaaattgaatatacttgttatataaagagtggtaacaataagaaatactagtaccccaaaggaaaaatgagaaaacgacatgcatagctaattcacaaaataattaccaatgtctgcaaagcatttttaaaaaggtttagtctctccagtaattaaataaagggatacagtagtcccccccttatctggaggagatatgttccaagacccccaggggatgcctgaaactacagatagtactaaacccgtattatgtactgtgtttattcccatctatacatatctatgagaaagtttaatttctaaatgaggcacagtaagagattaacaacaataactaataatagaacaattataacaatatattgttataaaagttaggtgaatgtggtctttctctctgtgtgtcaaaatatcttactgtactgcccacgggtagctgaaaccctagaaatcaaacccaaagataagggaggactactgtatttttaaatgtgttttttttgtctgttaaattatatatatttttaaaacagaaatgctcattgctgctgagcatgcagagagaagacaggccccccttttacttctgctgggagcactaatggttttactgtgtggaggaagaaatttgataacatatagtaacagatttaacaatatttatgccctcggactctgtcatccgacttctaaaatccttctaaataaataacccaataaattttaaaagtctaggttctgggatatttgttgcagcattatttaccctatcaaagagttggaaacaacctaaatgaaccaaaataagtagtttactaaataattatggtcaaccatcccatacaatgtttggcagtcattaaaaaccgaactttaaagaatagacaactacatagtgaaatatattccgaagtgaaaaaagccatctatggaactgtatatgcacagtgtgacatttcataagcttgcagagaaaatcagctatgatgcatgcaaatgttaacagtgcttgtctccatgtagtggaagtaggggtggcagtctcccttctttatacatttctgaagtttccaaatgttttacaaagagcaggtgctgcttttatgttcagaaaccctacatctttttttttaaataatgaagtggcccttatgttttttctggcctggttactctccaggccactgagcagagccttcgtgcccctaaccaagtgctctctgtcccctcagggcaagctggaaatgaccttggagattgtagcagagagtgagcatgaggagcggcctgctggccagggccgggatgagcccaacatgaaccctaagcttgaggacccaaggtcagtgcccagcccctgagccccaatgcccacaggtctgggggtataggccacagtccaggaggcatcccattgcatggccatgtagaagtcacaaagcccacgtggctcagagaggggcacgactcatccaaggccacacagtaagttagggggaaggtgatgggcatctgtccagagaacactgggctcagcgaattcaagatgcaggtgctattgggtacctgttggttgtgtgccaagcatgctatcctatgcatgtgtacattgtgctatggaaccttccctgcagggtagttgttattatccccattttacagatgaggaacaatctcagcaaagttaaataagggcattccagctaggacagtggtgaagcagaaatgctctcacctggtctgattggctccagagcccgatcaaggtcttgaccctaccaagctgccttcggtggctctcctatggtgccagtgtgactttcaaatggtttttcagccttcatttttccatctgtgaaatggggagcccaatccctgtcttccctacatcacagacctcttggggagatagaccaagccaatggatgtagatgctgtgaaggcagttacaggggcagagtcactgaaagatggctgtgggggctcaggaatgtgtttgctggatcccgccccaccagcctacttggctcaagttggatttagcatagatggctcagttagtcaccatgctgtgattagcaccgtgtgcctgagtgccatggggctggcagagcagtgagaggcacccttgcctaaggatgctgggatctgcacaggaagaaaagagagacccgtgagacaccagtgtgcaatctgatgttaacggggccatgatggagacccagaatcctccacgtattttgagatgtggagctggcctagggaaaggttttgagattcttggttgtgagagaaccagcttcctatgttctcttcccaccgttgttccctgagcatggactagccatgtgcatctgggcaggtgtcttggcttatctggggctcggtgggctggagagcactttgaagcactgcccagctcctaaatctgcagtttgtgattaagtcctgggtcaggaatgggtgagggcaccaaggaaggtgtcctggagaggatggcagagaaactgggccactgaggatgcttagggcttggcagcacccagaagaggagggcagcacaggtgggggtgatactgtagcaagggcttgggggagagggaatgcaaggtgcaaagggctagtttagggacagggcctgggcaggcgctgggggtggactgtggagggccaggccattggacctgctgttgagagaagagtttggagaaagcagccctagtaaaggatgcccagttgacctccgggatctcgcttccaggcgccccgacacctccttcctgtggtttacctccccatacaagaccatgaagttcatcctgtggcggcgtttccggtgggccatcatcctcttcatcatcctcttcatcctgctgctgttcctggccatcttcatctacgccttcccggtgagcaggcctgacgacactgtggtgggggaactctgggtctaatgggggagttcatcattgtcctcaaagagctctcccagtctaatggagagaagtaacctctgtccttggagagcccctggtctgatgaggatacagagcccagctctggggagtctccaatctggtaggtgtacaaagttctacccttggaggctcttagtccagtgagagaaactgagttcttgcccttcatggtgagacaaagctgtcctcagcaagcccctagaatttgtaatgaaggggttaggagaagatgaggccctttgggttgcggtgggcagggggactttctggaagggaggtgtggaactgggtctgaaaggaaggtgagatgttgatggcagagcagagaaggtccctttgtcttaacagcagttgcaaatccagaggaagggaggagctggggctgggagagcatctcagggtccacctgaggcactcaatagagtgtgtcctgcctcctgcagcaggtgggcatagggaagctgtcggggagcgggaggctggcccaggagcccttacttggctcggtgcccatttgggtttcctttcacttggtaagaagccaattgatgagcttgtggggccataccagaggtggctgtcgtgcccttgctctgtggggccctgcctgggggaggaaggtccctgcctgtgcttccccagcccgcacagctcatcagggaacccggatcaccagggagcctcccccagtgtctctgatactttagaccttgaaggggttgcagcattctcaggctgacacctgatttctaatgctctttaaaatttaaaagaaatctttttaatatgaaaactccaaccctatataaaagtggagagaatggtgtaatccaccccttgaggaccttatgttggtggcaaagacgcaaacacccagagaaggaaagggcctggccgtaggctgcacagtattccatgcacactcccaatccagggctcactgtgattcccacttcaggcctcagtcctggtcagcaccaggccactggcccagagcattgatcccatggcagacaggctgcttggggaactgcccccaggtgagctctttgctctgtgagtcctccaggaggaggaaagggcaagagcccctccatcccactgcagctggctatgcccatgtctgcagaatgcatctcagagaggaagagagttataaccacacagctttccatgcagttctaacagctgaactgagaggagctggggaaaggatgtctggtttggatgtccggaccagctaccatctgggccatagtgactaaggagagtctagaaccagggtggtgaagggtctgcctacaggccaggcctgctaagctggctgtggtcacctgaggcgcaatggagaaatgtttctgaggttctgaggtttgtccatcagcaaaatctgactgtggtccagggtagatctaggttgcagggactcgaggtgtgtacgatgtgggaggcctctttaagccaagggagacgagattacaaatataagctgagatacaggactgtggaagagtgtgtgcacgtgtggtgtcctgcagcatgagctgttgctgtgacctgagatccggggtcaggccccaggacttctgcctggtgtctcctgcccagggggcacccttcccagcctgcctcaagctcctcctcccattcggagcccagctggccagtgttcagttagccacagagactctaagcacgtgtgtgcgtctgggaggtaagggcgtgttttggggatgagggagaagaggatgaggcctcatgccactggggagtgctcacttccctggggagacattgaaaccagagagtaaggaaaagtactgtggatgatcaaatgctcttttgggaggctcaggccgtgggagtttaggaagagaagagctgctgcagaccctcgcccttggtgtagtcggaggactagcagcagtagcaccagggaactcactagaaactcagagtccccggccggccccggcctgctgagggggaatctgcatgtaggcacatgatggttggagaaaccctgttggatgtgacagagctctgtcgctggagtcaggattatggactcttcctgtgaccttggcaaatccctcctgctcacatgaggaaggggctgcactaggttagctctggccttctgtggctgggactgtgcttaggggagcactgtcatcttccctggctgctgtatattaagccaagcctccttctgaaaagccaaggggaggggaaaggcaggtccaaagtggcatcaccaccacccatgacatgcctaagcccagcccctgccagctgcaccctgcactgctaggctactgggcagcagatctaggcctccaggggcctggggaaggaggccctgctgcctggctgggagaggaaggaaagatttccagtcacttccagcctgtggtccttcctcatcgctgtgggcagaagcagagtggtactgtggggggcctggtcagagctcctccctgtctcctgtccccccagcagcgggccactctcctttgagttcttctggaagttgtcctctttaaaatatggaccctgcttcccctctcccagggctggtgtggggatgtcagatcctaggtaaggggtctagggatgaagggggtggcctgggcctgaggctgcagactggctttgctcacaggtctttgctacaagctgagcacatcctgcctccttccacccaagtcactcattcatttggccagtaccagatgatgagggccgggccctggtgaccctcacctggctttcaggccatgggacagaggctgcctgccccaagccagggcctagtggagaggggcccaaggacagggcagcttcctccagttggcctaatcccctaccctcttggaaattcccttgggaggggtatgagggggcagcctgtctgattcctctcagcttccccctcagagccagccgggagcagggccagcgtggggaggcaggaggcgtttggcggggaaggagggccggctctgtttccagagttggctttccccagccggcgctggggaacatactgtcccaattaggagccctgtattgtgttgtatgtgttttcatggtttttggggggagaagtggggaggggaggatactgtcaatcctgcagcaggcagggctcaatcaagggtgccctgtctctagtgctgggctgtgccgtgggtcatccacgacagcccatccccaactctctctctgctttctggacaggggtgtgatgacccgtaagccctgggctgccatgtgggggaggaccctgggccccaccttcagcacctgtctgatggaagaggccaggtccagggtgctcagagtcctctgggcagtcagctggaacctggaaatgggcctggcttgatgggggagaagacagagcaatttgggcagctttggcccccaggtgggagggtgcgggtggagtttcggagggtatgggtttgcctgatgggctggagcactaggcagggcggagtgttgagccccacatggtatggatggcaagtggtgagggcgaggcgtgggcaggtggttgaagagccacgagcgtcctctcccagcctcttgcctgttggcagcttagccccatcctctgagccccaggtctgggacagctgctctggctgtgcctgccccagtgggatcaccatgggtccctgtctcctccctccctccagaactatgctgccatgaagctggtgaagcccttcagctgaggactctcctgccctgtagaaggggccgtggggtcccctccagcatgggactggcctgcctcctccgcccagctcggcgagctcctccagacctcctaggcctgattgtcctgccagggtgggcagacagacagatggaccggcccacactcccagagttgctaacatggagctctgagatcaccccacttccatcatttccttctcccccaacccaacgcttttttggatcagctcagacatatttcagtataaaacagttggaaccaca

SEQ ID NO: 14 - DNA, 82989 bp, Homo sapiens
  source 1..82989: mol_type = genomic DNA; note = FKTN_gene
gtaaagcggagcggctgcagcctgctgttgagtgaggtaaggtacgggaggctcaggtcggtacccggggatgggtgggcgccttcagacaggtaccgctggcgactcgggtgcccttaccgggcatcctccagcattctgggcacctgcctaccccttggtgaggaggccggccacaggctgagcgcgctccgggctgggtactcctcagtcagtccacgagcatcgcgtggtagacttccacttggccagtccttcccgcacttctgggcgtgtcatcaggtgaaatcttaatcctgggacagatgaaaggttggaggacgatcgagactcttgtagtagccgggttagggtagtgacccctgacctcaggttatccgcccgcgttggcctctcaaagtgctgagattacagccgtgagccaccgcgcccggcctgaaatttacaatttctcatttaacatgaggtaagccacatttctcttggcttcagttttgtcagatgtggaaaaaaaaaaaaaaggacctagatgatatatcagattctttatgcttttgaagatagcacgtttccagtcggtaaaaatcaagctgtgaacaaatgacaaagtgaatgatagagcagtatattagaaattgggcagatggaagcccagtagaaaaggctgtgtttgagctagactctgaggataaatagggtttgaacgattggaaaccatctctgttgggccatggacaaagatatcaaatgcaggaataagcatttatattttagcgattctatttgtggacataagtttagtgagggtagaggatttgggaaggctggcattgaacggtgaaagaactcttagtggaaaggaagtgcagggtgttctgacaaggaagaagaaaggaaccggggaaatgccgaaagaacaatacgcaggacttgatttcttggatctgggtgatgatatttttaacctgcgtttctaaaaagtaagtttaagtgctgttggcaaaaatgggaattctgttgaattccagcatgcaatagtgtactgggaataaagtgatttagatcgtagagtgctgaggttgccaataactagcctcttggctgtcatttaattcttctagagcctattctccataaggtgatgttgggccagctgatctctcttctctaaagcctgtaaaactagagactgtgaggatggagagctagttactttcttctggactgggagaggacgatagttgacagagaataaaattgttaattttggggctggacgcggtggctcacgcctgtaatcccagcactttgggaggctgaggcgggtggatcacctgaggccaaggagttcgaaaccagcctggccaacatggtgaaaccctatctctactaaaaatacaacaaattagccgggtgtggtggcgggcgcctgtaatcccagctactcctgaggctgaggcaggagaatcgcttgaacttgggaggcagaggttgcagtgagccaagatcaggccactgcactccggcctgggcaacaagagcgaaactctgtctcaaaaaaaaaaaaaagttaattttgaacatgttaaatttgaggtgaggtgcaggaaatagagttgaaaatataggcagatagagtgcatggactgtaatttaaatagtgttttctctcacaggtggtagttaaaatcttgagaatggatttggtttcagggagagattgtagagagagtaactataggccatacccacagagaggaggttggagaaattattgaaggaggcatgtggatctcagagctaagagcaaggaaggagttctttttaaaaaagttacatatagttgtagattctcaggggcccagtgttgttattaagctaatttaacagcatttacagcaaataataagcacctacttctgggaattctggcagaaaataaataattcaaatagatataatctccactgcctaattgtctacccagaagtggtatcatttacatatttatttattcaacaaatatttatatgtttcaagcactgctggttctagggatataacgacgagcaaggtagacattgttcttatcctccctgcatgtaaagcccttagcatctacatcagtgcttttcaaattttaatgtacatatgaatcatctgaggattttattaaaatgtagattatgaatcagtaggtgggggctgaaaattctgtattactaacaagctccaatgtgatactgatgttcttaggaccatacttttaagtgacaagaatctagatcctgtttagcaaatatggccgttattaagccactaccactacccatcatctgtttctcctaggataaaataattttacttcttatgaaaataatatatgcttatacaaatattggaacaatatagaaaagtgtaaagaaccatgtaaaaatcactcctaattctccctacccagagataaccattattaatatttttgggaacattcatccagattttacatatgtacatacattcacaatttaagtgttgcactaagtacatgtcacactctaagccctgtgtttgattctatttgctgtatgattttattaagataaatacccaagtgtccagaaccaagcaattaagtacttgcattcttgagggagccacttaaaaataatttgggggccaggcacggtggctcacgtctgtaatctcagcactttgggaggccaaggtggatggatcacgaggtcaagagatcaagaccatcctggccagcctgatgaaaccctgtctctactgaaaatacaaaaattagctaggcttggtggcacatgcctgtagtcccagctactcgggaggctgaggtaggagaatcacttgaacctgggagcggaggttgcagtgagctgagattgtgccactgcactccagcctggcaacagagcaagaatccgtctcaaaaaacaaaaaaaaaaacaaaacaaaaaacaaactttgggagccggacagtgtctcatgcctataatcattccaggtgcccaagaggctgaggtgggaggattgcttgtgcctagcagtttgaggcagcagtgagctatgattgtgacactgcactccagcctgggtgacagagcaagactccatttcttaaaaaaataaaaacttgtgttacttcaaaaatggggagacattaacataattacatgtgggctctagtaaatgaatatttgtcatttcatttaggatgagaggagaatttttaaagttttaaaaaaaacttagtttttttcttactacaaaatcaattgatgttcacgtaagataaataaggaaaaaaaataaaagcacctacactcctcccaacccaaagacaatccttgctgtcttcaccttccttcctgctaacctgtcttatctatatctttcatttcagccactatctttccaaaaccctcttacaccatagtcattcagaaaggagtaactatgtatttatgatttttctggagcatctactggagaaactaaatttcattagctttttatcttcaagtaacagcatgtgtaggtagaagttatattgcaaaggattaagtgcatgaatggtaagcaggtaaagaaacttcttaaccctttgcagtctaatgtttacttccaagctgctgacagttgtgaaaagttagcagtcaaaggaaaagaaatggacaataagaaagaccaacagtatttagggaagatttgatagtagctgttgctactgggatatttttggcttttgagaacagctgaaaaatgtcgatttttttttttttttggtctgacctctgaattcattttcagacgcattttctctttatgcctgccaatctgctacatcatctctctaactataccttttcctaattacactactctctttcctctgtagttcagcctcctgttttattttgttcagagcatatttgaatgtcagttctgttttaatgaattgcctgaaggattcttcctgtgcgctgcacaaacgaaaccagttcactgagactgtgctactgcagtaaagaaacagcttacttaacaatgatgctggctgtgcaaaggagttattactcaaatcagtctcgccaaagacttggtggttagtttttcaaggatagtttttagtttggtggcaggggactagggaatgagggctgctggttggctggggatgtgatgataagggtgtgaaaaatggtccttgtgtgctgagtccacctctgggtggggagccacgtgactggttgggtcatgagtcactagttcacctctaggtagtgtcagttggtccagaatgcaaaggtctgaaaaatatctcaaaagaccaatcttaggttctgtagccagggaaaatataaatcctgtgtcctctggaaaaaagactggttatcatttaactacatgttaccagaattcaggtccctctcataatcctaatcttgtagtctttcattacctttataaaggcagtttagttttggaaaaggttactatcatccttgctttaggttaaactgtaaactaaattcctttcaaagttagcttggcctgcacccagaaatgaccaaggacagattggaggtcagaaacaagatggaatcaactatgagatttctcttagctgtcataattttgcaaaggcagtttcactctctgattcatactatctatgcctcactcttactccccaatatccccaaataagtcggggatcccacagcataaggatatggctaggctctcacatatcatcttatgaacctaagttaggtgtcagggaaggtttttgattccacttccccccactcctgccttctggatcatctctcttgatatatcattcattcattcattcattcaaacagacccctacctaggtgattctcaaaagagtggggtctggggctggaggaggtgtcagggtaaaccagttaccaaaagtctttcatactaataccttcaaaggacaaatgcaaatgtaaaaaggaagctgaaagaatatgcagtggggttccaagatggccgaataggaacagctccagtctacagctcccagcgtgagcgacgcagaagacgggtgatttctgcatttctaactgagatactgagttcatctcactggggattatcggacagtgggtgcaggacagtgggtgcagcgcaccgagcgtgagccgaagcagggcaaggcatcacctcacccgggaagtgcaaggggtcagggaattccctttcctagccaagggaaggggggacaaatggcacctggaaaatcgggtcactcccaccctaatactgtgcttttccgacagtcttagcaaacagcacaccaggagattatatcccacgcctggctcggagggtcctatgcccacggagcctcactcatttgtagcacagcagtctgagattgaactgcaacgtggcagcgaggctgggggggggggcacccgccattgctgaggcttgagtagataaacagaggggccgggaagctcgaactgggtggagcccaccacagctcaaggaggcctgcctgcctctgtagacttcacctctgggggcagggcatagccaaacaaaaggcagcagaaacctctgcagacttaaatgttcctgtctgacagcttggaagagagtagtggttctcccagcatggagcttgagatctgagaacggacagactgcctcctcaagtgggtccctgaccctcaagtagcctaactgggaggcaccccacagtaggggcagactgacacctcacacagccgggtacccctctgagacgaaacttccagaggaacgatcaggcagcaacatttgctgttcagcaatattcgctgttctgcagcctctgctgatacccaggcaaacaggatctggagtggacctccagcaaactccaacagacctgcatctgagggtcctgactgttagaaggaaaactaacaaacagaaaggacatccacatcaaaacccatttgtacatcaacatcatcaaagaccaaaagtagataaaaccacaaagatggggaaaaaacagagcagaaaaactgaaaattctaaaaatcagagcacctctcctcctccaaaggaacgcagctcctcaccagcaatggaacaaagctggatggagaatgacttcgacaagttgagagaagaaggcttcagacgatcaaacttctccgagctaaaggaggaagttcaaacccaacacaaagaagttaaaaaccttgaaaaaagattagacgaatggctaactagaataaccaatgcagagaagtccttaaaggacctgatggagctgaaaaccatagcacgagaactacatgaagaatgcacaagcttcagtagccgatttgatcaactggaagaaagggtatcagtgatggaagatcaaatgaatgaaatgaagccagaagagaagtttagagaaaaaagaataaaccgaaatgaacaaagcctccaagaaatatgggactatgtgaaaagaccaaatctgcgtccgattggtgtacctgaaagtgacagggagaatggaaccaagttggaaagtactttgcaggatattatccaggagaacttccccaacctagcaaggcaggccaacattcaaattcaggaagtacagagaatgccacaaagatactcctcgagaagagcaactccaaaacacgtaattgtcagattcaccaaagttgaaatgaaggaaaaaatgttaagggcagccagagagaaaggtcgggttacccacaaagggaagcccatcagactaacagctgatctctcggcaggaactctacaagccagaagagagtgtgggccaatattcaacattcttaaagaaaagaatcttcaacccagaatttcatatccagccaaactaagcttcataagtgaaggagaaataaaatcctttacagacaagcaaatgctgagagattttgtcaccaccaggcctgccctaaaagagctcctgaagggagcactaaacatggaaaggaacagccgataccagcctctgcaaaaacatgccagattctaaagaccatggatgctaggcagaaactgcatcaactaacgaggaaaatcagcagctaacatcataatgacaggatcaaattcacacataacaatgttaaccttaaatgtaaatgggctaaatgccccaagtaaaagacacagactggcaaattggataaagagtcaagacccaccagtgtgctgtattcaggaaacccatctcacatgcaaagacacacataggctcaaaataaagggatggaggaagatctaccaagcaaatggaaaacaaaaaaaggtaggggttgcaatcctagtctctgataaaacagactttaaaccaacaaagatcaaaagagacaaagaaggccattacataatggtaaagggatcaattcaacaagaagagctaactgtcttaaatatatatgcacccaatacaggagcacccagattcataaagcaagtcctgtgtgacctacaaagagacttagactcccatacaataataatgggagactttaacaccctactgtcaacattagacagatcaacgagacagaaagttaacaaggatatccaggaattgaactcaactctgcagcaagtggacctaatagacatctatagaactctccaccccaaatcaacagaatatacattcttctcagcaccacaccacacttactccaaagttgaccacatatatggaagtaaagcactcctcagcaaatgcaaaagaacagaaattataacaaactgtctctcagaccacagtgcaatcaaactagaactcaggattaagaaactcactcaaaaccgctcaaatacatggaaactgaacaacctgctcctgaatgactactgggtacataacaaaatgaaggcagaaataaagatgtgctttgaaaccaaggagaacaaagacacaacataccagaatctctgggacatgtttaaagcaatgtgtagagggaaatttatagcactaaatgcccacaagagaaagcaggaaagatctaaaattgacaccctaacatcacaattaaaagaactagagaagcaagagcaaacacattcaaaagctaacagaaggcaagaaataactaagatcagagcggaactgcaggagatacagacacaaaaaacccttcaaaaaatcaatgaattcaggagctggttttttgaaaaggtcaacaaaattgatagaccactagcaagactaataaagaagaaaagagagaagaatgaaatagacgcaataaaaaacgataaaggggatatcaccaccgatcccaccgaaatacaaactaccatcagagaataaacacctctacacaaataaactagaaaatctagaagaaatggataaattccttgacacacacactctcccaagactaaaccaggaagaagttgaatctctgaatagaccaataacaggctctgaaattgaggcaataattaatagcttaccaaccaaaaaaagtccaggaccagatggattcacagccgaattctaccagaggtacaaggaggagctggtaccattccttctgaaattattccaatcaacagaaaaagagggaatcctccctaactcattttatgaggccagcatcatcctgataccaaagcctggcagagacataacaaaaaaagagaattttagatcaatatccctgatgaacatcgatgcaaaaatcctcaataaaatactggcaaaccgagtccagaagcacatcaaaaagcttatccaccatgatcaagtgggcttcatccccaggatgcaaggctggttcaacatacataaatcagtaaatgtaatccaacatataaacagaaccaacaacaaaagccacataagattatctcaatagatgcagaaaaggcctttgacaaaattcaacaactcttcatgctaaaaagtctcaataaattaggtattgatgggacgtatctcaaaataataagagccgtttatgacaaacccacagccaatatcatactgaatgggcaaaaactggaagcattccctttgaaaactggcacaagacagggatgccctctctcaccactcctattcagcatggtgttggaggttctggccagggcaatcaggcaggagaaagaaataaaagatatttagttaggaaaagaggaagtcaaattgtccctgtttgcagatgacatgattgtatatctagaaaaccccattgtctcagcccaaaatctccttaagctgataagcaacttcagcaaagtctcaggatacaaaatcaatgtgcaaaaatcacaagcattcttatacaccaaataacagagagccaaatcatgagtgaactcccattcacaattgcttcaaagagaataaaatacctaggaatccaacttacaagggatgtgaaggacctctttaaggagaagtacaaaccactgctcaacgaaataaaagaggacacaaacaaatggaagaacattctatgctcatggataggaagaatcgatatcttgaaaatggccatactgcccaaggtaatttatagattcagtgccatccccatcaagctaccaatgactttcttcacagaattggaaaaaactactttagagttcatatggaagcaaaaaagagcccgccttgccaagtcaatcctaagctaaaagaacaaagctggaggcatcacgctacctgacttcaaactatactacaaggctacagtaaccaaaacagcatggtactggtaccaaaacagagatatagaacaatggaacagaacggagccctcagaagtaataccacacatctacaactatctgatctttgacaaaactgataaaaacaagaaatggggaaaggattccctatttaacaaatggtgctgggaaaactggctagccatatgtagaaagctgaaactggatcccttccttacaccttatacaaaaattaattcaagatggattaaagacttaaatgttagacctaaaaccataaaaaccctagaagaaaaccaaggcaataccattcaggacataggcatgggcaaggacttcatgtctgaaacaccaaaagcaatggcaacaaaagacaaaattgacaaaagggagctaattaaactgaagagcttctgcatagcaaaagaaactaccatcagagtgaacaggcaacctacagaatgggagaaaatttttgcaatctactcatctgacaaagggctaatacccagaatctacaaagaactcaaacaaatttacaagaaaaaaacaaccccatcaacaagtgggcaaaggatatgaacagacacttctcaaaagaagacatttatgcagccaacagacacatgaaaaaatgctcatcatcactggccatcagagaaatgcaaatcaaaaccatgataagataccatctcacaccagttagaatggcgatcattaaaaagtcaggaaacaacaggtgctggagaggatgtggagaaataggaacacttttacactgttggtgggacagtaaactggttcaaccattgtggaagacagtgtggcgattcctctgggatctagaactagaaataccatttgacccagtgatcccattactgggtatatacccaaaggattataagtcatgctgctataaagacacatgcacatgtatgtttattgtggcactattcacaatagcaaagacctggaaccaacccagatgtccatcagtgatagaccggattaagaaaatgtggcacatatacaccatgaaatattatgcagccataaaaaaggatgagttcatgtcctttgtagggacatggatgaagctggaaaccatcattctcagcaaactatctcaaggacagaaaaccaaacatcgcatgttctcactcataggtgggaactgaacaatgagaacacttggtcacaggaagggggacatcacacaccggggcctgttgtgggatgggagcaagggggaggcgtagcattggtagatatacctaatgtaaatgatgagttaatgggtacagcacaccaacatggcacatgtatacatatgtaacaaacctgcatgttgtgcacatgtaccctagagcttaaaatataataataaaaaaaataagtaaataaaaaagaatatgcagtgctgctcttcactgtagaaagagcctgagaattatcttgaactccaaatcctgtaccttttttcatcacagttgtgtatgggttttatctactactagtttttttccaagccttttcacatcttgacacatagtaaatttgaccaagaaaagatgaaaggaaacataaaagaatgtgttcttggctggagatgacctactcttggggtctagctgccccaaagactgagaggattgttaactctgacacctataacccattcatgatttagttggtaagcagatctgcccatttctttcttcttcattgccagatctcagttcatgcactagttatgccctgcttccacttcatctaagaataattctgtgtcgcaatataccataattatatattaatcttctcatatttgcattagaactttaagattattgggctacttaaacttcgtaactcccctcgttacatcttttttttccctgaaaacatttgtcatttctctcccaaccactgcctcattttaatttactatctctgcaatactttttcttttcttttccattagagatgatatgctgtcttctttaggaaactttacctaagtgtaagtaaggaaatgaatgctatcctccctagtgtttttattatgatagctaaaatgtaacatataaaaagaagtgtatatagaaacaatatttttgttttagttctatgccatatctctctataggttattttttatatttttaaacgtttattttttgaaggttggaaccagatatgtgagtttaaggggctttaaactcttttaaaaatcttttttttttatatttcaaattctgttttattgtaaaagttcctgcagaacagaaaagttttatttaaatagttttctgttttcttgagcattgtgcagtgtatttttagtatacttagcatacttactattacttgatgttaattcagccaattttaggctggtggggaagatgattcatgtacactaacagttataatgcaaaatagaaactagtaaaagcctcaaggttagttgcctctccttgtgcttccatagtaacccgtgcttattccttcattgcaactatactgtattgttattgcctctatatttatctctgatagagtccatcataaactagaacagtggttcttaattgatgtgggggtggtaaggaatggggcttgcgcattttggaaaacatcttctcatattctttttcaggtacatcactctctccaccactatcactactgcccttcttcttttgaaaactcctgtactcacctttaagcccttcaaaattagggaagtgtatcttatttgtcattttatctctagtgcttagcatttttttttggcatctgtgcccattaaggtagacagtaactgtttatttgttgcaggaaggtaaaactaggttggaggtggagggagcacttctaacctggaagaatattgaagacttccttgaagaagtgtcatttgagaggagctatgaaaagaaagtaaactggttttatggaagtaaatgagaacattgcagacaagaggtaatgggcaaaaacacagaggcaggaaagtgtaggatgtattccaggaatactcatgcaaaaaccatagactatgtgaagtgtgagaaagcttatagtaaatttgcctgtattcagtcagattgtgaatacccctttataccattatatgtaatttgaactatttgtaggtggtagggaactattgaaaagttttgattgtggtgtaacttgatttatctgtcagcaacttgatacatctgtcagtgtataggtaagattgtggatacagagaaagtggagacagggacatcagttaaaattaggacattaggtacaattagagtttagaatgacagtgaagaaggaaggaattgatgcaagaggtattttaaaggtaaaatcaacatactatggcttctttttttcagtgtcacattattcatttttaagtggttactgaatattcctaatgaagcggtagtgctagtgaaaaggaacattttgataggcgaatctttctcttttgtgactgaattgccttggcatttatagaaaataaataatgaagttaattggatatcatcttgataataaaaatgtaattaagtttttgatattatggtttggaggtttattttataagaattagttgtaaactagagaagaaagaacaagatattaatttagattttatgcctgtagtagcttatataggcaggcctattatgtgttctttcccatttattaatttgggcttagaagaagctgagttatggcctactctgagtgccactttagatttcactaggaatcagcatagaatacattaatgcactgtttaatacaagtacaagaacttgagttgaaatcttgaaaatgaagggcagtctccttgttaatcttgtgagctgccctcatcagagtataggttgagcatcccaaatctgaaaattcaaaatctgaaatgctccaaaatctgcaacttttgcgtgctaatatgatgctgaaaggaatgttcattggagcatttcagaattttggattagggatgttcaactggtaagtgtaatccaaatattctggaatcctaagaagtccaaaatacttttggtcccaagcattttggataagggatactaaacctctatttgataattgtatttccatgggttttaactgaatacaaaaactaataccatcatcaatgttgattgatattgttttcacagttttgggagatacaaaataattatgatttattaggttatctttgcttaatatacattactgatcaggtgaattgttcacatcactattggtattatttctcttaagtagtttcttgagactgtatatatatatatatatatattttagtgtttgctttatatagtcatcagctctggcagctcatttggattgttttaaaaccccaaaccaagacttgattttaagatggtaaagacatttgtgccctattctatctgaaattaccatgaaacaacaaggaaactgagagaaagagatgtaattacatctttgctgagactagaagacctgtaactccaaactgaaatatttgagaaatggcagccacatgtaagcaggaagaggttaaaagagaatgctggtagaaagagatctcagatagagctggcagagcaaagagtcctcttctgtttgcagtgggatcaggatgcatagaaaggcaatgggaatttccttggattgtttggcaacatgaactagcaagaaaggaagagtgaatgaggaagtgcacagataccccatctttgcaggaagcactctcttgctgaggcaaagtagaggagagatagtgagtggccctttgctgcctgtctctgacatctggaagaagtaatgtttaaatgcttttcccacttgttctcatacacattctctgcctttctcacatatacacatgtacaaaatactctgtcagaaagagttttcttgtataccagagactaccctctagtctagaatacacccttatttctttcttccatagttaaggcgtaaattatattcccgtttagaaaagtagatgaggactgggtgccgtggctcatgcctgtaatcccagcactttgggaggctgaggcaggtgggttgcttgaggtgaggagttcgtgaccagcctgaccaccacagaaaaaccccgtctaaactaaatatacaaaaattagccgagtgtggtggcaggcacctgtaatcccagttactcgggaggctgagataggagaattgcttgaacccaggaggtgaaggttgcagtgaactgagatcgtgccactgcactccatccagcctgagtgacagagggagactctgtctcaaaaaaaaaaatgcttaattgtagttctgaaaatagagaattcaatgttataacagaaaaaatatttaagaaaaccttctgcaaagaaaagacatctttaggtcaggctcagtagtagctcacacctgtaattccagcactttgggaggctaaggcaggaggttctcttgaggctgggagtttaagaccagcttgggcaacatagcaagaccctgtctttacaaataaatttttaaaaaattagctgggcatggtggcacatacttttactcatggctactcaggaggctgagataggaagatcacttaagtgtgggagtttcgggttacaatgagctatgattgcaccattatacttcagcctggacgacaaagtgagaccctgtctcaaaaaaaaaaaaatctttattctacagattgaaaggaaacacactgaatgaggaaaaactaacatacggtcatcaacatccttgtataacctagtttttaaaaaaattggatttcaaaggtaaggaatgcattctttgctcatcccaataaaaagattaaattacctatcaggagttggtttgggaaatcagatattgtcaagggaatatttagcactacaggacaatggtacaaagtgtgtaagtcattggggaaagacagtgtaacctcaaagccaaattgacaactatttttgaacaaggcaaaagctcaaggtaagtggtacccctaagttctttttgataaactgcaagaagatgaatatcagtcatacagtagatgaacagagatgatatagcaaatggattggcagggaacattgtaggaataagaccaaaataactatgagatttgtagttatagaatacaatagaactgtaacatgtagaaataattaataaaagtcaagattgaaagaggagagaagacagaatgtagtataaatttgttggtttcttcttattttatagctggagaacaaaagacatataaaccttagatatcaagcataagagaggtgtcagtatatttgaaggattgaaggaataaatgtaagcatttgaagaactaaatgtgtttaaccaaaatcaaacagtggagacaaggtaggaagaagtagaactgtattaaatttcttatcctaaaggaataatcagagatgagacctaagatgaaagaacaaaatgtttattgtggcattctttacagttgaaaaaactgaaaacatacatggagtataaataaaaactgaccacatcctagatcacacacaaacttgaaaagcaacaaagagctgtcttacaggccatgttccttgactaaaaacggtctcagtttctcctttggaagtggttctcagcattgtcagcagcaccagcatcatttgggaacttgtcagaaatgaaaattctgaggtctcataccggatttactgaatcagaaactggaggagaaaagcacctctcaaccttgttggtcagtttttataaatatcctatttatgttttcagttatttacagttataaaaaaaagtgataataaacatttttgttttttcatcattggtctcatatttgattatttctttagcatagacaatgaccagatcaaagaatgcctgtggaaatttaattttttctttgttctattgttggttattacaggtacaaaattaaagaggtttttgtttctttaaaaatatcttttttgttcacagaaaacaaaattatcttcctttccaaatccaaaaagatgaaaacgactgagatactttcaaaagacaaccaagtgagcagcacagactaatgagtagaatcaataagaacgtggttttggcccttttaacgctgacaagttctgcatttctgctgtttcagttgtactactacaagcactatttatcaacaaaggtaattttattccttctttcttatcattcctcctttcttatcattgtatattttctgatcacacttctctttgcaatacataatattaatcatgggtattcaaattcttgcatctttgcgaggtgtggcaaacaattaaaaattcagttaaatatacttgtaatagcacactaaagacaggtgctaagtttcaaggatgtttaatctattggaatttcctgagctagttatttaaaaattattattttgttaaacagattatccttcatttaaatgaactcaatgataaataattttgataaaatgtcaaaattagtttattttagtacagcatatattttaatttagtacctactggggaagtataatggtatgacttacctttatctgtatgtataggaataaagtagagacaatgatgtggaaatcaatagcttctgaagattccgtagaatataccagataaggaattccaaagttgagatggtgttgttacattgtgaaaagttgccaaacactccctctggggtgtattataataattactaccatcactgataattgtactagatgctttccatgctcagtttagtcctaaaaacaatcatggggaagaaaaaaaattttttttgtttttatgtttttatcctcatgtcttaattagaactattcatcagaattaatcactttgcgcccctcctcaactagaatggagtatacttccctgccttttttatgttgggcttgaccagtagaatgttaacagacatgtgcagaagctttgaataggctgttgtgatttgacttagtttttatgctcccctgacctataggagaagagaaaaatgtatggagcagaccaaagcatagctgcccagctgactcacagatttgtgagggaggaaatagatgcttataagccataagactgggggaagtttattatgcagcattgttacatggagttattagacctaattttgacagataagaaaactgaaacttttcttttttttttttttttaattaatttattttttttattatactttaagttttagggtacatttgcacattgtgcaggttagttacatatgtatacatttgccgtgctggtgtgctgcacccactaactcgtcatctagcattaggtatatctcccaatgctatccctccccactcccaccaccccacaacagtccccagagtgtgatattccccttcctgtgtccatgtgatctcattgttcatttcccacctatgagtgagaatatgcggtgtttggttttttgttcttacgatagtttactgagaatgatgatttccaatttcatccatgtccctacaaaggacgtgaactcatcattttttatggctgcatagtattccatggtgtatatgtgccacattttcttaatccagtctatcattgttggacatttgggttggttccaagtctttgctattgtgaataatgccgcaataaacatacgtgtgcatgtgtctttatagcagcatgatttatagtcatttgggtatatacccagtaatgggatggctgggtcaaatggtatttctagttctagatccctgaggaatcgccacactgacttccacaatggttgaactagtttacagtcccaccaacagtgtaaaagtgttcctgtttctccacatcctctccagcacctgttgtttcctgactttttaatgattgccattctaactggtgtgagatggtatctcattgtggttttgatttgcatttctctgatggccagtgatgatgagcattttttcatgtgtcttttggctgcataaatgtcttcttttgagaagtgtctgttcatgtccttcgcccactttttgatggggtggtttgtttttttcttgtaaatttgtttgagttcattgtagattctggatattagccctttgtcagatgagtaggttgcaaaaattttctcccattttgtaggttgcctgttcactctgatggtagtttcttttgctgtgcagaagctctttattttaattagatcccatttgtcaattttgtcttttgttgctattgcttttggtgttttggacatgaagtccttgcccatgcctatgtcctgaatggtaatgcctaggttttcttctagggtttttatggttttaggtctaacgtttaaatctttaatccatcttgaattgatttttgtataaggtgtaaggaagggatccagtttcagctttctacatatggctagccagttttcccagcaccatttattaaatagggaatcctttccccatttcttgtttttctcaggtttgtcaaagatcagatagttgtaggtatgcggcattatttctgagggctctgttctgttccattgatctatatctctgttttggtaccagtaccatgctgttttggttactgtagccttgtagtatagtttgaagtcaggtagcgtgatgcctccagctttgttcttttggcttaggattgacttggcgatgcgggctcttttttggttccctatgaactttaaagtagttttttcgaattctgtgaagaaagtcattggtagcttgatggggatggcattgaatctgtaaattaccttgggcagtatggccattttcacaatattgattcttcctacccatgagcatggaatgttcttccatttgtttgtatcctcttttatttccttgagcagtggtttgtagttctccttgaagaggtccttcacatcccttgtaagttggattcctaggtattttattctctttgaagcaattatgaataggagttcacttatgatttggctctctgtttgtgtgttgttggtgtataagaatgcttgtgatttttgcacattgattttgtatcttgagactttgctgaagttgcttatcagcttaaggagattttaggctgagacaatggggttttctagatatacaatcatgtcgtctgcaaacagggacagtttgacttcctcttttcctaattgaataccctttatttccttctcctgcctaattgccctggccagaacttccaacactatgttgaataggagtggtgagagaggacatccctgtcttgtgccagttttcaaagggaatgcttccagtttttgcccattcagtatgatattggctgtgggtttgtcatagatagctcttatcattttgaaatacgtcccatcaatacctaatttattgagagtttttagcatgaagggttgttgaattttgtcaaaggctttttctgcatctattgagataatcatgtggtttttgtctttggctctgtttatatgctggattacatttattgatttgcgtatattgaaccagccttgcatcccagggatgaagcccacttgatcatggtggataagctttttgatgtgctgctggattcggtttgccagtattttattgaggatttttgcatcaatgttcatcaagaatattggtctaaaattctctttttttgttgagtctctgcccggctttggtatcagaatgatgctggcctcataaaatgagttagggaggattccctctttttctattgattggaatagtttcagaaggaatggtaccagctcctccttgtacctctggtagaattcggctgtgaatccatctggtcctggactttttttggttggtaagctattaattattgcctcaatttcagagcctgttattggtctattcagagattcaacttcttcctggtttagtcttgggagagtgtatgtgtcaaggaatttatccatttcttctagattttctagtttatttgtgtagaggtgtttattctctgatggtagtttgtatttcagtgggatcggtggtgatatcccctttatcgttttttattgcgtctatttcattcttctctcttttcttctttattagtcttgctagtggtctatcaattttgttgaccttttcaaaaaaccagctcctggattcattgattttttgaatggttttttgtgtctgtatctcctgcagttctgctctgatcttagttatttcttgccttctgttagcttttgaatgtgtttgctcttgcttctctagttctcttaattgtgatgttagggtgtcaattttagatctttcctgctttctcttgtgggcatttagtgctataaatttccctctacacattgctttaaacatgtcccagagattctggtatgtcgtgtctttgttctcgttggtttcaaagaacatctttatttctgccttcatttcgttatgtacccagtagtcattcaggagcaggttgttcagtttccatgtagttgagcggctttgagtgagtttcttaatcctgagttctagtttgattgcactgtggtctgagagatagtttgttataatttgtgttcttttacatttgctgaggagagctttacttccaagtatgtggtcaattttggaataggtgtggtgtggtgctgaaaaaaatgtatattctgttgatttggggtggagagttctgtagatgtctattaggtccgcttggtgcagagctgagttcaattcctgggtatccttgttgactttctgtctcgttgatctgtctaatgttgacagtggggtgttaaagtctcccattattaatgtgtgggagtctaagtctctttgtaggtcacacaggacttgctttatgaatctgggtgctcctgtattgggtgcatatatatttaggctagttagctcttcttgttgaattgatccctttaccattatgtaatggccttctttgtctcttttgatctttgttggtttaaagtctgttttatcagaaactaggattgcaacccctgcctttttttgttttccatttgcttggtagatcttcctccatccttttattttgagcctatgtgtgtctctgcacgtgagatgggtttcctgaatacagcatactggtgggtcttgactctttatccaatttgccagtctgtgtcttttaattggagaatttagtccatttacatttaaagttaatattgttatgtgtgaatttgatcctgtcattatgatgttagctgctgattttcctcgttagttgacgcagtttcttcctagtctcgacggtctttacattttggcatgattttgcagcagctggtaccggttgttcctttccatgtttagtgcttccttcaggagctcttttagggcaggcctggtggtgacaaaatctctcagcatttgcttgtctgtaaagtatttaatttctccttcacttatgaagcttagtttggctggatatgaaattctgggttgaaaattcttttctttaagaatgttgaatattggcccccactctcttctggcttgtagggtttctgccaagagatccgctgttagtctgatgggcttccctttgagggtaacccgacctttctctctggctgcccttaacattttttccttcatttcaactttggtgaatctgacaattatgtgtcttggagttgctcttctcgaggagtatctttgtggcgttctctgtatttcctgaatctgaacgttggcctgccttgctagattggggaagttctcctggataatatcctgcagagtgttttccaacttggttccattctccccatcactttcaggtacaccaatcagacgtagatttggtcttttcacatagtcccatatttcttggaggctttgctcatttctttttattcttttttctctaaacttcccttctcgcttcatttcattcatttcatcttccattgctgataccctttcttccagttgatcgcatcggctcctgaggcttctgcattcttcacgtagttctcgagccttggttttcagctccatcagctcctttaagtacttctctgtattggttattctagttatacattcttctcaatttttttcaaagtttttaacttctttgcctttggtttgaatgtcctcccgtagctcagagtaatttgatcgtctgaagccttcttctctcagctcgtcaaagtcattctccatccagctttgttccgttgctggtgaggaactgcgttcctttgtaggaggagaggcgctctgcgttttagagtttccagtttttctgttctgttttttccccatctttgtggttttatctacttttggtctttgatgatggtgatgtacagatgggttttcggtgtggatgtcctttctgtttgttagttttccttctaacagacaggaccctcagctgcaggtctgttggagtaccctgccttgtgaggtgtcagtgtgcccctgctgcggggtgcctcccagttaggctgctcgggggtcaggggtcagggacccacttgaggaggcagtctgccggttctcagatctccagctgcgtgctgggagaaccactgctctcttcaaagctgtcagacagggacattgaagtctgcagaggttactgctgtctttttgtttgtctgtgccctgcccccagaggtggagcctacagaggcaggcaggcctccttgaactgtggtgggctccatgcagttcgagcttcccggctgctttgtttacctaagcaagcctgggcaatggcgggcgcccctcccccagcctcgctgccgccttgcagtttgatctcagactgctgggctagcaatcagcgagattccgtgggcgtaggaccctccgagccaggtgtgggatatagtctcgtggtgcactgttttttaagccggtctgaaaagcgcaatattcgggtgggagtgacccgattttccaggtgtgtccgtcacccctttctttgactcagaaagggaactccctgacaccttgcgcttcccaggtgaggcaatgcctcgccctgcttcggctcgcgcacggtgcgcgcacccactagcctgcgcccactgtctggcactccctagtgagatgaacccggtacctcagatggaaatgcagaaatcacccgtcttctgcgtcgctcatgctgggagctgtagaccggagctgttcctattcggccatcttggctcctacccgaaacttttctttttttaagagaggatctcgcttcgtcacccaggctgaagtacagtggcataatcatagctcactgtaaccttgaatctggggctcaagcagtactcctgcctcaatctcctgagttgttaggaggactacaggcacatgccatcacgcctgactaattaaaaaaaattttttgtagagacggggtctcgctgtgttgcccaggctggtcttgaactcctggcctcaggcagttctgtcacctcaggctcccaaagtgctgggattacaagtatgggctactgcaactggcctggaaaaccaaaattgttaacagagatgtgaaataatttacccatacaaaccacccaatatctaatgtgtatagctgacctctaatgtccctagctccattttttccaggctatataattttaaaaataacagactatactgattctacttttgatcttggctgtttatccaatgaatgtctttctgtgacatcttcaaccctttcctcattattttcttaggataaagtcctagagtagaaattctagatctaatatgcacattttagatttttgttatatattacaaagttatccttcataaggataagcagtatacctgatttctcatatcttttcataaataggaataacaataataatggcatctgtttcagttagagatggctggctaatagtagcttaaacaaatagaggaattatctgtccatatctataagtctagagcctctaaaattctcttggtatttcctgtgttacagtcaaggctagaaggaataatagtgtgatctagcaggcttctagttttgtgacagtggccagcagattcccaaatataagagaatctggggaagtaaggttttactattgttatttagcttttctagcctctataatagagattgcaaaagagaaggggtttgggaatgggtgtcaggtcagcttacctatagtgcctgccatagcagctaacattttttgatgtgcttgattgagcaggccctatgcgaagcactttaccaacatttaattcttaaaacaagttgagtagatcttgttcttcctgtttttccagcaaaaacattgaggttttgagagacttactaattttcccaatatcacatagttattaagtgggggagatgaacctgaggagtctaccccaaaacctcattcattaatttttagtgttcgtaatattcagaaactgaaagctattcaactccattagaggtcgtttctttgattactagtggggttaaacatctttccatatgtatattggttctttttagttgtattcttacttcttcttatttgtgtctttcatatatgttcctgatgatgttgtctttttctgtagctgttctttatagtttgaagaatattaaaccttcatcatatatatttcaaatatttttcctgacttgtaatttgccttttaactttatattcatgatgtactccctcaataaattagtacttaatgtataaatagacagatgtcaaaatctgttttccttagggcatctgttttttatgttataagtagcccaagattatgggaatatttaactgtatttttgtctatttaatgtttaaattttttcactaaaatgaatttattttagtatgaggtatgaattagacatctaacttacatttttccacaatgattaaccaattgtcccaatatcccttattgaattacccattactttaaaaatcccatcttaattatatattaaattctaataaagaactgctgtctcaacccttttcccttggtggcagtgtaacatagttgttgagagcatgaacatcagtttgagattaaacctcatctatactgcttattagctgtgggatcttgagttaattacttgacttctaaatgcctttgtttccttatctacaaaatgggaggcaataacagtaccacctcatagacttgtgaagcttaaatgaattgatatacataaactatttggaacaatgcatgttatacagaaagaaaccagtaaaaattggctattattattattttttaattttataatgaaaaatagtatttgttgtattgtgtccataccatacaaactgccttagtaataatgccttattcattaaagaaaatataatctttgaacagaagtggtatgtaattaaagttcaggtaacctttatataccattaattttgtaaagttcattattcatactagattcttgttttttatgtttacttttgataataggtagacattataacatctaagttctaaaatatcacagattatttttattttattgaaatatatggagtgggtgcagtggctcacacctgtagtcccagaatttggggacactgaggtgtgcagattgcttgagcccaagagtttgaaaccagccatggcaccatggcaaaaccccatttctacaaaaaatacaaatattagcccagcatggtggcgtgtgcctgtagtcccagctattcaagaggctgaggtgagaggatcacttgagcttgggagattcaaggctgcagtgagctgtcattgcgccactgcactccagcctgggtgacggggagatcgtgtcttaaaattttttttttttaacatatggaaattatattaaaccgtttgtagcccagtaattgtatcctttaaaatggaatttttaaatttactcatgagttcagaaactgttatttaaaagtcacaatttgtagagtattttgccaaggcaatagaaacaatgaggtggtttcttcctgcccaatatttataatttaatttgggacagatgctgatgagagtatagatgcttcctgtatgttatagtgtgaaaacaggatactgtctgtaaggaatacaagcagtttctctatgccagtaggaaaaaaaaatgctttatttaaaaatagtaaggagaccaggtgcctgcctgtaatcccagcactttgggaggcttaggcgagaggatcgcttgagcccaggaattcaagaccagcctgggcaacatagtaagatctcatctctgctaaaaataagaaaattagctggttgtggtggtgcacgcctgtagtcctagctacttgggacactgaggtgagagaatccctctgagcccaggagtttgagtttacagtgagctaagatctgcactccaggatggacaagagagggagaccctgtctcaaaaaataaataaataaatatgtacatatgtaaaataaaaatagtaaggatagttagactaattagatgctaaagataccaacttttaaatttatttcagtgtcattgtggaaaattttgaagcttttgggtttttgttaaacttataaatctcacttacacgcagcgtttttgaactcaaagtttagtgaagtatagatgcatcctcagttttctaatggttttcttctgacataggaagagaacctgaactattgttaactttgtttaccgattacatctgaattgcattcctctgttgttcaatgagcagtgttttgtgggatatgcttagataaataaattcatgtaaaaattacttatagttcaattaaatgtttgatttggtagccaaagagtatggaatcatagtcttgatcagtgtgaaattataggttagcgtcatcaacataaaaaccaagattctaagtcatccttgaacttcaaggtaattttcagagacccttgagattatgtgttagagatagggatgaaaaattgattttatcttttattccaacccaaatttagtagcagtaaatgcctgcagcaccatggtaagaaggactgcaaagctttcaggcttttcaggaaagaacactctagtactggctaccttggagtttaaggagacttacttttgaccattttgagggccttagcacagaactactcttggtcctagctggttagacaagcctagcttttctatgatcctccaaatgggatctgaataatccagttatcatgttagcattgaagataaagaactagtatattatatttattgggtctactaaaatttcatagacgggtagaattgactcttcagattccagaacaacccttcaggtcttggatatacaaactcctttagtgtagtgtccttgtgagcattgtctgtgggcgccaactttcaagtagttggcttgcagctcacaccagaatggaaaggacatgtttctaggaccctgaagagaattttcattgttcactgtttttatgcaaccaacaggatagtatgataattgtgtgtgttcatttaatccgtatttattgatcactcgtcttacacagtgtacttaggaatacagagataaatagaacacaggccctactcatgaaactcataatttgatagacatggcagcatcaataatttttgagtttgggcactacatagtcctcatgcaattgtttggctttcagcaagtcactttgagcaccagtttctttaaatgggtctaatggcaacattgctggttgagataatgtatgtgatatgtctcacttagtgtctgatacatggtagatgataactatcagtagcttacattttctagtacttttaaggtttacattgcagtttgacaagtaaaattgtattaaattcttatagtgtccctataagcttatattttttactttttcataaaccaagttaactggggtccagatatgttaagtttcttaagttcaagattgccaatcaggtcctaaaacttgtatttattcatacagctattccaacatgtaaatataaatttgttcaaaagaaatgagtgataagatatgaaatgagatggctttaaggaatgccgtagcacaacagaaaatcgtcaaatattgatgcctatgtggagggaagacaaagccaatgaactatgtttgtattaggcactgagtgatccaagcctttttattgttcttgacttagtccaatgagcagcaccagtgcctgcagtaatcagctgtttgtattatctaggagcccacttatagaattgggtgctgagatatcttattttgcattctatttagtagcctatgtatgtttggttagaaggagggaggagggagttgaaaggggagtttggatttcaagtttggcagtagtcattcacagtgagcaattttatatgccattattagaaatggaaatcagtcttgtagccatttagatcatgtgcaacaaaggcttttgaatatttttagttggttagttacttgctaaaattatgcaagaaatatgattttccctttatcttttttcacttttgggcttcttccattttgccttcaaggataacatataggtcatttctggaggaagaatattatatttgatagcttgatccaatgtggtaaactttaataaatactactgccccacttcttctatcaccctctcactcctgctattatccaggagaaatgtgatataatttctttcattagaattgaagggtgtttttatagtctttccattttttcatttattctcaaacattaggctgtgtaggtttgtaggttttctggccagttttgattattaagaatcacagcttttctaccatttaaggtcacatttatgagtgattcactaataaatctaagaactgcagtggcttgggagtaaatataagagaaatgtttctactggaaagagaaacactgagaggcagaagtggaaggctatctggagggttgtggaattggcaatggtcagtgtttctgatccttaggtttgcaagcttataagcaattgaaaaagacagttattgaagacttaattttttctgaaagtactactgtttgattctatatgagcataattaatgatcatgctgaattaggaatttggtttgagggtttctataagaaacactgttggatactgcatttcaaaaatgatagaattttttcttaaatcttcacctcctactttctggatgctttttctttgataatatatctttatttgacccagttatcactagagttcagttgctaccagacttttcctaccagttgttgttggcatctgattccatctgtttactcatttattcatttcccgtaaatttttactccaaatatcccataggcagtgtgtcagaatatttttttttaaccagttgactttacatggcatttctttcagaacattctgccattcatttgtcaagtatttgttgaaagcttactgtgtgccaagcacagtaataggctatgaaacaaatgatcagtgaagttcaatccttatgtctaggaactcacaaattgggaaatttgggggatgaaggggagagaggttaagaaacataaagagacatataagcaaacaataacaatacatgttacctcttttttcaaagcacacttcataacttttctgttctctagtatctagcctttgtaatctttcttctgtactgttgtcagagatatttttcttagatgcagatctgatccaagttattctctgcatagtatacctatggaataagaaccaaacttcttagcatagcatgctggatatactgtttgctctccaaattctctctttaccatactctgttcttggggaggcagacctttatggattatattagctgagctcccttgccctttggtttcctgttgggtttagccaatgggatacggctggagattgcaaactggaaagaaagagaggtcagattatttattctcttggttctctacttgtagggtcattggttgacagtgactgcatcttcctgtatagctacagttgcagccactgtagctgccactgagtgccaataactcttgctctccagagacggattaaacgttaagataatgaaatttaaacttcagggcccctcacttgcaggggacttgcagaggccttaggaatctgtttacaaagctatttatttttgtaacatttgcaaaagttatttttacattctttctgaagaagggccgacggctgggcacagtggcttatgcttgtaatcccagcatttttggaggccgaggtgggtggatcacctgaggtcaggagttcgagaccagcctggctaacatggtgaaaccctgtctctaccccaaataccaaaattagctgggtgttgtggcatatgcctgcctgtaatcccagctattcaggaagctgaggcacgagaatcgcttgaacccaggaggcggaggttgcagtgagccaaaatcacgccagtgcactccagcctgggtgacagaatgagactccatctcaaaaaaaaactggggggggcgggtactaacaaaatggtataatcttcaggccctataaaactggaccctccaatgtccttaaccttgacccttcaagcttaggtaagtataaggtttacagggaagagagactactgaataacatacttgggaaggctattaatgaatatttcatggatgaaataataatttgagttggtgttgtaggatgaggagttcttcaggtgaagaaggatagaaaggtcattacaaatagaagacacagcctgttcaaagggaatgagtattttgatgtctacagtgaagcatactaggtagaaaacaaagaaaatacaaaagtcctgcggcaggaatatgtctgtcagttttgagaacagcatagagatcaatgtggctgtagacaaatgagtgatggggagaatagtaggtaaggttagagtttcctgttacttagggtcttgtaagccgttgtaaggactttgaccttttatcctgagtgagactgggaaacaggaaggttttgagctatgtggacatgatctgactattgttttaaaacaagtagcctggccactttgatgagaatagattggctgtgttgccacccaaatctcatctttaattgtagctcccataattcccatgtgctggggggggacctggtgggagataattgaatcatgggggtggcttcccccatactgttcttgtggtagcaaataagtctcatgagagctgatgattttataaggggagatctgatgatttctccttttgcttgattctgattttctcttgtctgctgccatgtaagatatacctttcaccttctgccatgattgtgaggcctccccagctacttggaactgtgagttcattaaacttcttttgtaagttgcccagtctcaggtatgtctttatcagcaacgtgaaaatggactaatacacagagagaccagttagaaggctattctagtaatttacacaagagatgataatgatttggacaagagagttgatggtagagttggtgagaaatggaaagtacagtattcaggatttgttgatggattcgatgtagggtattagagtgacagaagcgagtcaaggataactctagtatttttgtcctaagtaattgcaatggcaaattgctgtttactgagatggatgagactgggaagagcaagtttgaggaatggtgaaaatcaggagtttttttgtacgtgttaagtttaaggtgctatgttaatctgttctttcattgctgtaaagaaatatctgaggcagggtaatttataaagaaaagaggtttaattggctcatggttctgcaggctgtagaggaagcatgatgctagcatctgctcaacttctggggaggcctcaggaaacttacaatcgtggcagcaggtgaagggggagcccgcacctcacatggccagagcaggaggaaaagagagagtggggagatgctacacacttttaaacaaccagatcttaggggaactcactcactccctatcacaagaatagcaccaagaggatggtgctaaaccattcatgacaaactgtccccacaatccaattacctcccaccaggccccatttccaacactggggattacaatttgacatgagatttggtggggacacagatctaaaccatattattctgcccctggcccctcacacctcatgatcctttcacattgcaaaatacaatcatgccttcccaacagtccttcaaagtcttaacttattccaacattaactcaatagttcaaagtctcatctgagacaaggcaagccccttccacctatgagcctgtaaaataaaaaattagttagttactcccaagattcgatgggggtatagtcattgggtaaatactcctgttccaaaagggagaaattggccaaaagaaaggggctacaggccccatgcaagccccaaacccagcaggttactcattaagtcttaaaaccccaaaatttgactccatgtctcatgtccagggcacacgggggtgggctcccaaggccttgggcagctcagaccctgtggctttgcagggttcagcccccacaactgctctcatgggctgacattgagtgcctgcagcttttcctggtgtaccatgcaggttactggtggatctaccactttggggtctggaggactgtggccctcttctcacagctccagtaggcagtgccccagtgggggctctctgtgggagcttcaaccctgcatttcccttccacactattctagtagagttctccatgagggctccattagcagcaagcttctgcctggacatccaggcttttccatacatcctctgaaatctaggcagaggctcttaagcctcaactcttgcactgtgtgcacctgcttacagcttgcaccctctgaagcagcctcagctatacctgtgcccccttgagccatggctggaactagagcagctggaatgcagggagcagtgtcttgaggctactcagggtggcaggcactgggcgtagcccaccaaactattcttccctcctacgtctccaggcctgtgatgggaggggctacctccaaggtctttgaaatgccttcaaagccttgtccccattttcttggcgaatgcaaatttctgcagcctgcttgaattcctcccctgaaaatagacttttcttttctatcacatggccaggctgcaaattttccaaacatgtatgccctgcttccctattaaatatgttccaattttatgtcatttctttgctcacacatatgagcataggttgttagaagcagccaggccagatcttgaactctttgctgcttagaaatttcttctgggttgggcatggtggctcatgcctataatctcagcactttggtaggccgagttgggtggatcacaaggtcaggagttcgagatcagcctggccaatatggtgaaaccctgtctctactaaaaatacaaaaattagctgggtgtggtgatgggtgcctgtaatcctagctactcagaaggctgaggcaggaaaattgcttgaaactggatagcagaggttgcagtgagccacgatcataccactgcaatccagcttgggcaacaagagtgaactctgtctcaaaaaaaagaaaaaaagaaatttcttcttccaggtaccctaaactatcactctcgagttcagagtttcacagatctctagggccagggcacaatgcagccaggttgtttgctaaggcataacaaaagtgactttttgcttcacctcccaatacattcctgatttccatctgagacttccttagcctgggcttcattgtccatatcactataagcatcttgatcacaaccattcaacaagtctctaggaagtttcaaattttccctcatcttcctgtcttcttctgagccctccaaactttccctttgcctattacccagttccaaagttacttccacattttcagacaccttacagcaacactgctttcctggtaccaattttctgtagttagtctgttctcgaattgctataaagaaacacctaagactgggtaatttataaaggaaagtttaattgtctcattgttctagaggctgtacaggaagcatgatactggcatctgcttggcttctgtggaggcctcaggaaacttagaatcatggcagaaggtgaaggcggaaccagcacttcatatggctggagcaggaagaagagagagagggaggaggtgctacagtcttttaaacagttagatctcaggataactcactcactcattatcacaagaacagcaccaaagggatggtgctaaatccgtcacgagaaactgtttacatgatacagtcacctcccaccaggtactgcctccaacactggggattacaattcagtatgagatttggtggggcacagatccaaagcacatcaggtgcctatttgacattcaaatgaagaaggtgaatagacaattggctatataagtctgggtagagtgggttgggagtacaaatggagtgttgtaagcatatagatggtgtctaaagccatatgactagatgagatactaaggaagtgaatatagatttttaaagggggagaaagaaagtgccaacatctgaggtttgggaccctccaacacatcagggaagtaggaagaactgacaagttaaagaagcagccagagagaaacagagaaaaaacagaaatatggtgatacagagagctaagtgaatgaagtgtttcagtgaggcagaggttgtcaacaattcttggtatatcaaataagataagtattgataattgaccgttggatttagcaatgttcaggtcattggtgatcttgatgatgctcagcagagtgaatttaaaatgaagtgagttcatgggaggagaggaattggaggcaatgagaagagacaacccattaggagttttgctgtaatgggggacagaaagttgttctttgggaaaagaggagttgagaagtttttgtgttttgttttaattattagtgttttaagatggaataaataatagtcatgtttgtatactgatgggaatgatccatcagagaaagaaaaattgctggagcaatgtctttgtccagtcaaggggggatgggatttagtgcataagtggagaggctggccttagataggaacatagacaattcatctgttatgacagaagggaaggtgtattatatggatataattcttgtacagtaggtgggaagatgtggtgggggtttttgaaaattattttcaaatttcttttttctcagtgaaatagaaagcaatgccataagttgaaagataggatagggaggtgttagaaaaaagggggaaaagtcatctaggagaatgagacagttaatacacaaggggaatgtagtatgatttctgggcagaattaaagccccacttgggattagtagtcatgaatttaaattgacatcagccagatatggtgtctcacacctggaatcccagcactttgggaggcggaagcaagtggatcacttgagatcagcctaggcaatatggtgacaacctgtctttatgaaaaatacaaaaattagccaggtgtggtagtgcatgcctctatagtttcagctgctaggaagactgaggtaggagtatcacttgagtctgggaggttgaggctgcagtgagccgtgatcacgccactgcactccagcctgggcaacagagacccctgtctcattaataatagtaataataataaagtgatatcagtcagcagccacattagctgcacagttgcaggtgcagaataagtagaaagttggcctttgctgagcaaataaaatgaagtcagatggaggaaagttgtcagtgtatacaagagaatgattgtgaaacatgaatatttccgattgcatttttcataatagccaaaagctggaaataacctaaatgttcatcaactaatgaatgaatatacaatggaatattagccataaaaggaaatgaagtactgatacatgccacagcatgaatgaactttgaaaacatcatgcttagtgaaaaaccagatgtaaaaggccacatatatgattccatttttatgtagtgtccataatgggcaaatccacagagaagataattagtgttatgattggggctgagtggaggaggaaaggggagtggctgttaataggaacatagtttctttttggagtgattaaaatattctggaattagatagtggtaatagttgcacaactctaaacatactaaaaatcactttagaaaggcagattttatggtatgtgaattatatctcaataaagctatataaaaataacatgctagctcactagaaatttgcttatcccaaactcaacaaattgaacagctcagaaatatagctgagctgtatttgtaatcaactaatgtaggactaaggtgaacaagtagctgtattacaatgtttgcagtctcttttcaggtttcaagattacagttgtttttttctcagacatcccttagtattaaaatgttattggctaagttgcagagcttgtgaggagagaccaattctggctcagtcttaattacttagtatcttcatctctccatcccttcctctccccttccaattaacaaacctttactaagctataaaaatcatcaagcactatcctaggtgctactggttatacaaagatggattggactttgtccctccccttgaatgtgaggtttaatggggaaatgaggtttaggaacttggagcacatttcatttttagggtgagactactctaatcgttcttcagcatcctcccatctatagcttatagataacgtatgcactcaaggcataagaaacttatttggatcttcattacgcttgaaacattcttccttttgtctctagaacatcagacattctttctcctcttactctaaagtattttggggctaccagatgaaaactcataataattttcttctgatgctctagacctgaaatatcttttataaaaacttcaacattcaaaattacgatgtatgttaggcaaagcgtgcatactggtgctatctgcaaaacaaataataatgtttaccttgcaggattgttgtgagggatcaatgagtatacataattgatatatggaagtgtcaaacacacgagctcttcaataaacattagtatactttatcactttgccaaagtctacaaacactaattttatatatggcaatatgttgagattgcagatatagacatagaccttaacagacaaaccctaattccaaagagtttgccattcattgatggaaattaattggttcagagatgttgaccatgtctaccttattatttaataacttaattaacttactacaaatctatcgatgttttccatcttggatttttatatcataaaaatgtagaattcttagctcatgactatatgaaaaatagatatttgataatgctttttaatgattataagctaattatattttgaatctcatgcctaactgaaatgtaatgttgcatgctggactttgaatttactaaaaagttcttttgttgtcttcctagaatggagctggtttgtcaaaatccaaaggaagccgaattggatttgatagcacacagtgggtatgtagaataaacaagaaatttctcaattataatgttcatttagttcattcatttactccgtaagtatttgttgaatgatggcaataataatagctaccttgtgtggtgggtggccggttggtagtggcaggtaagggacaggccctttaccaagtgctttatgcaatgtcttatttagtccctatagaaagtttaagaagtgagtaaatattgttactctcaattcacttagagagattaaacttagttggctgataatttggtaagaccagattctgtctgcctctaaaacccacattcactgagctatggtgtttccctaaatgaatgaatatatgaatcagatttatttgaataagggaaaagtaatgatcaggaataaaaatctattcaacctattcctttataagatgaggggaaaccagcaatatatacaatatatccttgttttgttttagaaatttcagaacctacacattgataaaatatattttcctatgttttaaaactaaatttagaaagaaaaacattgctgggttactaataaaacacaacatttattctgttagcatacattatgggaatgaccagatatttcttgatacacttcaatctttggcttctctataactagagatgtggaacactttaaattagaagtggattttcagatcaccaagcagtggtcattttagatcattgctaacaccaagtagattttgaactactgtttaaaagtaaagtctgggatatcctattatcaggctccccagctctctagtctataagtgtcaatgtaaacttttaatttattaaaaatagcaattgttttgctctgtgaatttagggtattctgaggataaaggtaagcatgatatacttggaagttatactacccagtcacagttataaagattttagattaaattaaaaagaggtattttgtatgcttctctgtaacacttctctacctccatcccacccttaggaaacacatacacctaatacttggacctgatttatcatcttgtggttgaagtaatttgctgagatttaaaattcagtattttaacagccaaaggcaacaggggtgatctttcatacattttaacattataagatgtgatgatacttagagaaacatatatttttcagatttgccatttattaggagtcttcatctgtacactgtaaagcaatttcagcaaaaaatttaaagccgtagtagcttcagttggataaaaggttttcctttatcggtattaaccaacaacattctgacaacattcccaaaccttttagtaaatagagagagcagtcagagaaagtacaggttcactgatacattttaaaatggaatttgtgaaaaatttaaagcttaaaataatagaaaaaagtagcgtgactctatccttttcattcaagaaatgatccttgaggtgggagaaaataatggatttttttcaaagtctttacttccacggtacgcaagcaaaaagttgaagagcagcttaccacattcagtgagttctctttatactcttttacattgaggggactaaaaaaaattgtaaatgtggtcactgaatgactatatttgcaaaatcacaggaaaggagaagtactaacatacttctaaacttttagaaggaataaaaggtgaaatctcatcaatagtgtgatattgagccctggtaaaattctagggctcaatgtttatggagttattaaacagatgacttgggagcacttagaaaagaaaatgatcataattaggaactaggcttttactaagaacaagtcctgccaagactttttaggttttaataaaattttaatacacaggcagatgaatgggctattatggtctcagcataatctcttttcaacaagatgtttttcagtcttataaacaaaatgagttactgaaggtcagatgataatagtgatttagaattaattggatttagaatcaactggacacgtttccaaggagcgttaatgattgtattgataacaacttggaggatgtgtttagaaggtgagttatagaatctctgcttgaccctgacctaatctgtatttatattaataatggtaatgaagctataagtgtgttcatcatatttgtatttaacaccaacctgagatccattcaacaaacattaaagtaccttttatgtagtagttctgttatctcatctttcttccaaaaccatttctttcttgtttttttcctagtataaagcacagaaagtaataaccctaaaagacacacacacacacacacacaaaatagctaaattggactattaaaattttaaacttctagtcatcaaaaaacactattaagaaaatgaataagcatgccacagagtagcaaatatttgtaaaacatgtatctcacaaaggaatggtatcaaagatatatgaagaactcccacacgactcagtaatagattttttgttcatgcctttcatcaagttgaggatgtattttattcctggtttgctgaaagttttaaatcatgaatagatactgaattttgtcaaatgcttttttctatattgaaattatcatagtttttcacttttttctgttgatttgtcaaattttattgattgattttcaaatgctaaagtaagctttcattcctaggataaatactacttggtcatgatatttactttccttttttatctttttttagttactggaattgattttctaatattttattaagtatttttgcatctgtgttcatgagggatggtggactatacttttttttgtaaggtctttgtcaggttttgcttttttttttttttttttgagatgaagtctctctgtcgcccaggctggagtgcagccatgtgatctcggctcactgcaacctccaccttgtgatctcggctcactgcaacctccacctcccgggttcaagtgattctcctgcctcagcctcctgagttgctgggactacaggcacacaccaccacgcccggctaatttttgtatttttagtagagacagggtttcaccatgttggccaggctggtcctgaactcctgacctcaggtgatccacctgccttgacctcccacagtgctgggattacaggcgtgagaagttttgctgttgagtatggcactggcctcttaaaatcagataggaagtattttctcctgctccattttctcagaaagtttttgtagaattggtattcttccttaaaaatgatagaattcaccagtgaactgtctaagtctgaagtttttccttgttgttttgagggcagtttttttttttcctaacaaattcagtttctttaataggtatagggcaattcagattttgtttcatcttgtggcagttttgttaaattgtatttttaaagaaatttgtgtcatctaagttgaattttttggtgtaacattgtttatcctaactttttacttagctgtttctcacactgaggtaataaacccctataaggcagagattattgtattcttggcatttgcataatactctacactaaaaacaaataatgagactgattcttagctttatctcatcctttatccttacaattgatattttgtctatttatttatcttgtatatatttttatgagttccttcagattttctgaataagaatttattcttaatttcatgaagcacctttttgataggcaaacattcctataagtcttgctttcattgaagtaggcttttaagcaatagtgtatgccagatattctgtttatccttgctgttcttagatattacttattcctaagtgtgatttagtccattttcattctactgttgaatttttgtttttttcagtaggggaccctacttactacccagcagagttatattttgaaatattgcagtattagaaaagcacattatatatggcagtcatcaagcaggcagtgtattttggtctgagtcttttgcttagaaagattattaagcagcattacagatatgaagaaaaatggtacaaacaactgaattttgtttttgaaagattaacaagactgatttttaaaagctgacggatagttctctcaattttgcttgaaaagatttagctaatactaagagaataattttttaagcaccacattttcatgtcagataccacttcctctgtgaaatttcttatccttttgatgtatggtaaatttgtagcttactggtctgtacttttataatatgttgtatatgtttttcttgtagcatatttcaccttatattgaaaatgttcatctttcttagaagactgcttattgagagcagagaccatatgtgctatttaatcatttgtattttttagcacaatgataagcatggtatctattgggtaactactctgcattcttatacaattaatgaattaaaatgttataaaatagactgttgtgttggcttactggaattacgagaattctttttctctcaaacagcgtgcagttaaaaaatttattatgttaacatccaaccaaaatgtaccagtgtttcttattgatcctttgatactggaattgattaataagaactttgaacaagtcaaaaatacttctcatggctctacttcacaatgcaagtttttctgtgttccaagagactttactgcatttgcactgcagtatcacctatggaagaatgaggtaagtgacttgctttcagataatggaatgtgtctctttttacaaaatagtataggtttaggctagtttaaaatgtaaaacattaaaaatttttcctgaaacactttataaattgtatcaggaatattttcagctataaataacaatacaactaatcactaaggcaaataggggatttctttttcttatataatgagaggttaaaaggttagtggctattgatattagtttagctagccactgatgtcaggacttgtgtctctgaaattctttattcatttacctcattatcacaggatagctgtcgtagctccacatatcacatccatgttcacaacaggaagatgagaggaaagattctgcttttttgctgggggaaacttctcaatatcggtatttttaggtcatttctgttgaactgtttgatatctcatagaaaaagcctacaaggcttatttttacaaagaatattttataatgtccctttatattccccaaatgaagttcatagaaattataaccctcctatatacataattccccaaatcaatataatgtattaactataatataacctagaaataaaaggaaatgatatgtattgctgtgtgcagatgctccagaatgactacactggaagacataataaagtaattcagatgcttgtatttagaagtaggatcacagaatgtggtagctacaaatataaacccatactatgaatgatattgttgttggcaatatgattttccaaaatagtgagcaagtttccaacaacaaaaaaagtaaaattgtctcttcattgacatgactattgtattcctgagaaataaaagctcagacaattataaacaagtttttcactatgtgattatgtgacaggacatttgaaattacatagtacacaggatagattttcatattttggattgtaggatatctaatgttcttggcctaggactctaaatgccagtttgtcattatgataaaccaaaaatatccccccaaatttctgaagtatctgttgggtacagtcccacttgccttgagaaccactattttagaagaaggggagtatgccaccattggcaaaactgatactaccatagtcaagaggaagaagcaaaagctcagccatacccagaatcagcacatgggttcaagtttattcttcgtttgtttttgtttgtttgtgttgggttttttgtttttgtttttgttttttgagacggagtctcgctgtgtcacccaggctggagtgcagtggtgcaatctctgttcactgcaatctccgcctcccaggctcaagggattctcctgcctcagcctcctgagtagctgggattacaggcgtgtgccaccacgtgtgactgatttttgtatttttttttagtagggacggggtttcaccatattggccaggctggtcttgaactcctgacctcaaatgatccacctgcctcagcctcccaaaagtttctccttttgtacatatgacatcctactattcaagagattcaagagcccttggatagtcccccctaaaacatcccccaatgtggagctaatcagattgttagatctaataatgaaagactccatttgcatgtgatttttctttattaatgccattaccataaagtgagcaaacctctgccaaggctactgggagtggacttttctagcaaaaccttgacctaggcctttacaccaattgatcagagcaactattttgttctttacttctcttgttgatggttataagaaagcaaaccatatcataattctgcctattttgtctgtcagtctttcctcctataacccaaggtcacgttcttctcaagttctggccggccttttaaatatttcctgaatttgtcagctgataatgcctttcttttattctattcagtagtgtctttctctgaattggctaccctccccctcagtcagtgctttctacttctaaggtgtaccaagaaagaaaagggaagaagggaatgttacagttgataatgaaacaaatgatgttggaaaatgaaccttgtcttacagtatgtttgttaatttctaatgatttgcattatgatggtgttctattatggtagtattttaagatgttgggatgtaaactatgagatgaaagaactacttttttgaagtacttttgaagataaaggttattaaaagttaaattaagaattacaagtttaattttaagtgctgtccttaaatcaacatttactttatagaaactaactggaaaacactaacatgagcattctcattccaaggaagggatttgtattaattttcatagagttttttttgttttttttttttgagacagggtctcactttgtcacccaggcttgagtgcagtggcacaatcttggctcactgcagccttgatctctcaggttcaagtgatcctcctggctcagacccccaagtagctgggactacaggtacatgccaccacaccttggcaaatttttgtttgtattttttgtagagacaggttgcccaggctggtctcaaactcctgagctcaagtgatccacctgcctcagcctcccaaagcgctgggattacaggggtgagctatggtgcccaacctataaagagagtctttggctatatctttcctgctacatactttgtatttttgctgctttcctttattctcccaccactaccttctgcccatcaccctcattaaaaaatgttcttacagagcagattagcacaaaaatatggctcaagttcaatataagaatcactttagttttgctactagtatttggctttaaatattcaatgtttaagtgttgtttcttgatgtttgatgcttctttggttctaggaaggctggtttcggatagctgagaatatgggatttcagtgcctaaagattgagagtaaagatccccggctagacgggatagactcactctctggaactgaaatccccctgcactatatctgcaaactggccactcatgcgatccacttggtagtctttcatgagaggagtggcaactacctctggcacggccacttgagacttaaagaacacattgacaggaaatttgttcccttccgaaagttacagtttggtcgttatccaggagcttttgacaggtaagttcagagtcaaaacgtgaaatgtgaaatgagtgttgttcagtcataattcttgcagtgtttttacatttgagtattgaaatctaatatataatttatataagtatttacagtaacattattcttaatgactccaaattagaagccacccaaatgtccttcaacaataaaaggattggctgggcactgtggctcatgcatgtaatcccagcactttgggaggccgaggtgggcagatcacctgaggtcaggagttcgagaccagcctggccaacatggtgaaacctcgtctctacaaaaaaatacaaaaattatccatgcattgtggtgggtgcctgtaatcccagctactggggaggctgaggaaggagaattgcttgagccctggaggtggaggttgtagtgagccgagattgtgataccacactctaggctgggcaacagagcaggactttgtctcaaaaaaaaaaaaaaaactgtaaaggaataaataatttttgatatatgtgttcatacaatgaagtattacacagcagggaaaaataaactaggggtctgtgcacattgtggatgaatcctacaatgctgaatgacacaaggcacaaaagaatctaaattctattattattattatttttttccattcaaaagtttcttttattcattaataaacaatgatatatatgtatacacagcttcataatcataccaaaaaagtttaagtgaactatcctttaaaggctgagaccataactttttgaacagaaataatatggattataagacagtatattgatttttgctgtctttattttaatataaagaacaaattgtgtggtaagactaatttattttcccactttgaaattaaacctctctagaaacatttagataaattatgaactaatctttaaaataccgtattacttcagcatttcaaaatcagtaagtttggaaactgtatttaagttaatattaggaataatataaccactgttgataactaacaatatagccaaaagaaaatgtggtacatacacacaatggagtactattcagccataaaaaagaatgagatcctgtcatttgcaacaacatggatagaactggagatcattatattaagtgaaataagccaggcacagaaagacaaactttccatgttctcacttatttgtgggagtgaaaaatgaaaataactgaactcatggagatagagagtagaatgatggttatcagaggctaggaagcatagtgggagaaagaggggaagagggggatggttaatgggtacaaaaaaatagttagaaataatgaataagactgagtatttgctaggacaacaaggtgactatagtaaaaaataattgtacattttaaaataactaaaagtatacttggattgtttaatacaaaggataaatgcttgaggtgatagataccccatttactctgatgtgattattatgcattgcatgcttgtatcaaaatattgcatgtaacccataagtatacacacctactatgtacctacaaaaattgaaaatacaaaagtgaaagtaaattctattattacttttataaaaagttcaaacacatgctaaattatgttcatggatgtatacccttatagtaaaagtattaagaaggctaagcaagacgtaccaaaaaagactagatagaggacacagagaactacagggaaactggaagaattttatttctgtggtggagactttggtgtttactttataattcattattttgtgcctttatgttatgcactttcctatatattttttaaaaccatgtgcaaaaatttatctttggctatctcaataataaaaatatttcttgtgagaaacagttatttgaaggaactcatgtaaaatttgattagctatagtttataatattaacaattacaggattaaaaacattcttgaagttatacttggagtatgaagtttctaacctagaattgttccttttattctccttttgaaatcagcgataatgatgttacagtctactttgaatagcagaatctgatgtaaaggtagcagtaaatatttgtaaggattttcacattaaaaactccttcttagtaacttccagtgagataattcttatctgttacacttgagaagtgtaagagtatgtttattcttgccttcttttaaaaatatatatatatattatatatatatgttttctctctatctggaatcatgtgagattgccttcttattagtacttaaagtcacatatttgagaatgactgaaaaaggtattcgaaactgaagtcttctatattttttgtgtatgaaaagtcggaacttttctgaaccaagccatattttcaaaatgaccaaaaaaaatgagtagagatggagaacaatactttgtttttattattggcttctcttattttaatcaaaaatcttaatactcactgttctcttaccacttttttgcctgtttttttcttattctgtatttcaaatgaccttctttagggagacattatcttttagttttttaaagctttgtgaatttatttcaaaatttaataacttagtaaagttcaaaattgtgagttacttattaaacataaacatgtgacaatagataaaagctatctctacattgtaaaattttatatgagtaggaatggaaaactctcaaataatatttttagagtatgggatccaaaatacataagatagatttgcagattagcattttacccattaatgagattctcaggccattgtaattaacttgtgtgtcttaagtgttaaaaacatttacttctctaaaagtaaactgataattaaaaattatgtcacaaaatttttgtttctgcttaaaatgccaagtgtgtatgaacaagtacaaatatattaatatataaatacattaaccaaaataattaaaactcaactgtttgatgtcagatttttcaaggtcttattaaaattgctaattgatatctgacataattgatgaaactatgcttgatgtttaggtattttgctaatgtttgatatttgtaagaggctgccagtattctgggttaaatccttttaataaatcttttattattattattattatttttaaattttactttaagtagtgggacacatgtactgaacgtgcaggtttgttacataggtatacatgtgccatggtagtttgctgcacctatcaacctgttatctaggttttaagctctgcacgcattaggtatttgtcctaatgttctccctccctgtttcccccacccctcattaataaatcttaacttttgttttcaggccagagttacagcaagttactgttgatggactggaagttctcattccaaaggatccaatgcactttgtagaagaagtaccacactctaggtttattgagtgtaggtataaagaagctcgagcattctttcaggttagagacaaccaaatgtgtacttttaaattaaagaaaatgttgggattatttttaatatttgagggtggtaagatgaaggggcttatggaaaatagaaaagtaaacatccttttttgatatgtctcttttcttctagattgttttctttcagttttttttagaagtagattaaaaattaaccttaagaaactattttctaagtcaataggttgatatttatttattgttttatttgaataactttaatagatttagcactggcttctgccttaagatagcccattaactttgtgaaaggtggtgtattctcagtccaagtaggataaagccactatagaagatggaccatgtagatttagaaaagacttcatgaaaatacagtttgtttcagagttggcattgaatataattttttttgcatttatgaaggtttttgaagataaatgctacacaaagaccaggtgcttttaaaactttattctcttgctgcagctttcaattcaatacacatttattgtgttccgcaggcttctggccctggggatataaagatgattttgaaaggcatgaaagttcagctctaagagatgacatgaaacacagagatacagtgaaaacaggcaaatttacagtggggttttggtacctgaattctttcacttgccctttattttctggggttccctgccaagaaagctgtgtccacgagggatacgaaaatgaagtatataactgtcaagtgcccaagacccacaaatctgaggtttctctaatacagtgtactggcacctaaagctgaggcctgacagcccaagtgggccttcgtagccctatttccttaagtcattgtggagctgtgaaatttatgcagccagcctcatgaataaaaagctgaaaaaccacatgtgtggatgggcctactctagtagaaaagtgctgcctgacatatgcctaccacataataacaggaagtagaagagatggagttttgtgcttaaacttgaccgctcttcctgtcctaagggagtttgctgtggttgtcatctctattatagcaattatcacagtgaattatgaatatctgtcttgtcctcttatcaaattttatgaacttcttgataacaggagtgttcttttatttacctgtgttggcccagtatctactgtacctggcataaagaaaagatccagtagggtcagttttcaaattaaagtgaacatacatgtatttgaacacttgatggcgccaaacagtcttaaatgtaatgcttggtgtaaagcaataaattaatctaatagacctcatcaagcagccgcctttctttttttaaaataatttttaaaaagcaattttaaatacataaaagctgcaagtacagtaccgataacttttttttttctgaaccacttgggagtaagatgttgaccacaacttcaaaaaatttagtatttttttaaaaataggaacattctctacatgtcctaatatgaaagttaggaaattagcacatacatttttaccatttaatccctattcaatttttgtcagttgtcccaataataacctttgtaataaaaagattcgattcagaatcacatgttgtcttaattttcctgtctctttagtcttcttcagtctgggacagtttctcagttcttttattactttcatgactaatactttggaagattacaagccagatgttttgtgcagtgtccctcatttggggtttgtccgggggttcctcatgttagatttaggttatacttctttagaaggtatagaagtggtgctgtgttctcattacatctcactgggcactgcataattttgatttatcccattactgttgatattcacattgttcacctgattaaagtgctgtctgaaacttcgtatctttaccactatgaagtttctgtttttccctttataataataagcatctggcaagaagttactttaaaactatgtaaatattgttttcctcattacattttcaatttatttgttcatatcaatataaataaattcatggtttcctattttaccctatgggttatagtcaattattttcattatttattttgatcttcagattgttccatatttggccagtagaaactccttcataatgctttctgtgtccttttgacttgtctccgttgttttttgaacactttagtactttttggcactataaaatattctgggttcatcttacaattttcatacctccaccctgggatcagccatttctttaagtcctgtttccttttagaagccaagacctggatgccaggtgtacccattgctatttgggttttgctgcagagagtttctctcagtgaacaggggtagggtgtatatgtctgtgtgtatttatttctgtatctatctattgaaacctctgaattcacattgacatctccagtccggttaaaagttccaattaaacaacagagttcatttccatatttgcgactcccttttcaaatcgtgagaaatctgactcccattgaccttaatgtttacttagttgttcagtctccctgtatgtaacctatcttccaacacatgtcctcccctccctaccccctgttcttctcaccctacctgggcactgctatcctctgctgggctgcacacacgtagaggcattcttcttaccctgttcaggctctgacttcccacacctggctgctgttctgcagagaggctttcctcaccctgcttgggctctgactccccacactggacactctcctactctcttcatgtggatgtcctcattacctgcctaggctctgataccccgtatcaggcaatccctttgcacaaaaacctttcttgctctgccccatctaatggttttagtatcgaatagttcaggaagggcgggagactttatttacttttaattattttctcaatctaccatgaagttcaaaaactagaataatataccttttcctgaatttgattttgttttagcaaaaaccatcacaagataattaatgagctccaggctgttgaatatcagtgaaaaaccaaaaggaaagttggaaatacctgtacacctggcctaggaatatctagataacaatatttttattttatttctactaatttgctctaagattttgggcaaatttctgagccttggtttcctcatctacaataagagttggtaccttctgtcatcttattctttgatataaggtttgtgcttttggattccacgattcttcttgggctttgtgtccccgttcattggctgaacaggaaaaattaaataaacatgatatttaaagtaggatattaattttgtctttttttagaggtatagtaatcctgagatttgtacttgggatttatttttatttgtttacttatttattttatttttaacttgtaagttcaggggtacaagtgcaagtttgttacataggtaaacttgtgttgtgggggtttgttgtacagattatttcaccacccaagtattaagcctagtacctattagttatttttcctggtcctctttctcctcccaccctccaaaagaacccattgtgtgttgttcccctctatgcgtccatgtgttctcatcatttagctcccacttataaaaacatgaagtattaggttttctgttcctgtgttagtttgctaaagataatggccttcagctccatccatgtccctgcaaagaacatgatcttgttcttttttatggctgcatagtattccatggtgtatatatactacattttatttatccagtctatcattgatgagcatttagattgattccatgcctttgctattgtgaatagtgctgcagggaacacacacatgtatgtgtctttataagagaatgaatgatttatattcctttcagtatatacctgataatggaattgctgggtcaaacagtatttctgtctttaggtcattgaggaatcaccacactgtcttccacaatggttgaactaatttacactcccaccaaccgtgtataagtgttcctttttctccacaacctcaccaatatctggggtttattttattttattttattttattttattagtttttttttacttgttatagtagccactctgactggtattagatagtatcgtattgttttttattgcattttctaatgatcagtgatgttgaacttttttcatatgattgttggccacatgtatgtcttttgaaaagtgtctgttcgtgtccttcacccactttttaatggggttgtttggttttttccttgaaaatttgtttaagttcctgatagatgctggatattagacctaatagttaaggtttgcaaaccatagtttgcaaaaatgctctcccattccataggttatatgtttactctgttgatagtttcttttgctgtgcagaagctctttattttaattagatcctatttgtcagtttttgcttttgttgcaatttcttttggcatcttcatgaaatttttgcctgtgcctgtgtcctaaatggtattgcctgggttatcttccagggttttatagttttgggttttacatttaagtctttaatctatcttgtacaggatatttttaaatgaaaaaagtatgtatactataatttttaaaatttatagcagatgtttaaggtatatagctctatgcatgtatgcactttaacacatacaaggatcagttctgagaaatggaatttctggctgggcgccatggctcacgcctgtaatcctagcactttgggaggccaaggcgggtggattgcctgagctcaggagtttgagaccagcctgggcaacatggcgaaaccccggctctacaaaacacacaaaaattagctggacatggtggtgtgcacttgtaatcccagctacttggaaggctgaggtagaagaatcacttgaacccaggaggtggaggttgcagtgagccaagatcatgcccctaaattccagcctgggcaacagagagaggagactttgtctccaaaaaaaaaaagaaatggaatttctgagagtgtcatgttaagaaaagtagattggggtgggaatatgtccatatgggagcagtaccagcagcaggtaactatcagacctgatgtttttgtagagcacaaatttttcatatttgctgtttagtcctttcagtcactctgtgtaataaggcaaggattcttttaacaggtaagaaaattgatgtttcaagatgtcagttacatggtcatcattggttgagcatggactaaatcctaggtctccacctcttaactccaggcttttcctactacaacaagcattataacatgtatctctcattccagtcatttattgtaagagcacttatggctttgaggaaagggatgtattcaaattgaagggatcctgtgtaatttgtatattctgtagacagtgacttatctgcaagaaattcttcttactgaaggtagggtactttttgcttaagattcatatagtccatccaggatctatattctttcctactatattgtaaaagaattacaggatattttaggatgttgcaggcctgggaggggcttagtcaatcatttattcatttgcccattcatcagtatgtgtttttcagatattatgtgccaggcaccattctaaacctgtagatacagtgatgaagagatgtagtacttgccctcagggaactatctttacagtctagtggagggaatataaaattgatgattaggaataaatatgatatgaattatagtaaaagtatttacaagtggtaactattataagcttgttaaggaaaaagataattcatttgtctttgtatatctagaaccaaacataattctttgctctataaatgttgaatagaaacacttcctgaataggaacattggaagaataaatacatatgtcttcctgggaaaactggggaatgttttgcagaggttggagctgagacttgaaagattttattgatcagggccatatcagacaaaggaaacaagtgcggaggcttgaaaagttgtggtgtatttgaggagttacaagttattgtggtatatttgggggtttacaagttataagatgaagtgtgaggagatgcagatgaggctggaccccagtagtcaggaaccagaacacagtgtttatgtccaccaggacaagaagtttagattttgtcccacaggtagcgaagcaacactatagaatttatagtgctttcctcagctccagaacactctaaaaacgaagagaatcagaaaaccaagatgactaaatgatatatatgacctgacaatttgcaagacatttttctccttcaatcttcacagcagtcctgtgaagtataataattatctttaaactacaaatgagaaaagtagatacaagagagatttgtttattacattctttcattcattcagcaaatactcaggcactactctacccactggagatataatgataaaatgaatgcactttcctcatagaaagtgaggatgatatgtacatggtcaaagctaaaaagaagtgcactagatttgataatctgattcaaaatctcaggctttttctactatactacacagtctctaaagaccaatagaatcactgaatggtgaaaacattattaaattctttttgtttcagctatgtttgtagctctcataattagctttattttatcctgattgtccagctactaaattgtgatgtaaaggagggagctgataaaaggatgtctcatcctttgggaatcctggttctattctttcccttttaatttatctctccaagaatctgctcttaagtgttcattttaatgtgggacaaacaagtaactgtaaaatgtggtttttataatataaaaagattatatggggttagttttcttttttttctcctttctttcttttttttttttcttttttgagacagtctcattctgtcgcccaggctggagtatagtggtgtgatctttgcttactgcaacctccacctcccgggttcaagtgattctcttgcctcaacctctcgagtagctggaactataggcgcgggccaccactctcagctaatttttatgtttttagtagagatggggttttgccatgtgggccaggccagttttgaactcctgaccccaagtgatccacctgccttggcttcccaaagttctggggttacaggcgtgagccactgtgcccagcctggggttaattttcaaatttaattcagatgccacagaaaggttcctagcaatttagaaatggctgtaatagctgactatttattatatctgtagcagtaccttgatgataacactgtggaagctgtggcctttcggaagagtgcaaaggaattactgcaactagcagcgaaaacattaaacaaattgggagtaccattctggctgagcagtggaacttgtctaggtaaaattcttacgactttccatttgtctttctgtcattttgtcctctggctttagggattactgcttgagatgacaaaatatcagtgacatttgaagtgtcatgtgtatagacagaataaacatgagtgcatgcagcaaggatctattgatttccttaaagaaattaatttgagaattataaaaaagaatgttagaaaggccatggttgtgtttactcataattataaataatatgtataaaatgtatatcagaacatgtagactatacaatagtccccccttatccatggacaatacattccaagaccaccagtggatgcctgaaatctccgatagtactgaaccctatatacgctgctctttccctatacatacatatgatgtttaatttataaattaggcacagtaagagatgaacaacaataaataataaaatggaacaattttaacaatactataataaaagttgtgtgtgatctctgtctctcagagtatcttattttactgtactcactgttattcttcttacgatggtgtgagatgataaaatgcctacatgatgagatgaagggagatgaaggatgtaggcattgtgatgtagtgttagtctactattgaaaatttcctgggaaaatcaaggaatgtgtcacagaggctaaatctgagccctgaaagatttgatttaacacttctgaattgtttatttctggaatttaccatttaatatcttcagatcgtggttgtccacaggtaactgaaactgctaaaagcaaaaccacggatatggcaggactactatagttgattctcagataatccttaaattagcattttattatttctatcccaaagattgttattgcctttttttataattataaaaaaccctctatttctttacttatataccattcaaacagcttgcattgcaccaaatgtttctactgagaggaacattaaagacagtgtcataaggtcttccatcagcctttcctaggtcattggtagtatcactaactagacatcactgttcatctgacatggacatacagacttttctacagtccttaagcaggttgctattagaatctgtgagtgatttctgggtctctgtccactgtccattaaatcaaacttctttggaatttagaattatttagaatcttaaattttgttttgtgtttatttgttgtctcttgattatcatgatagttaattatagctgtatttgctttttctttatagtaaccatatctgtacaaaagttaattcaactcctgcctttatagggatagggttgccatccaatttattgttcaattcaagagacttgagagtgaaaggaagcaccattaataattatgttggtacaacaggcataaactgggatatacggttatcctatctattagcctttgttgaaaatttacatggttcttcctgccaaggagcttactactagaataagccaaaaaaaaaaaaaaagtacatctcacacatttatgtgatatttgctttaaggtttaattttttagaaacaagattgttttataatgtgtgtcatcaaagacacttcatagtcatttgacatgatttgttttgagttttcagtcccatggttttctgtctgatttaagggcacttatgagggagttgtattagatgatatttaagaaaacttttatttttaattgtttataattctttaatagaattattttagaattccaaacaatattatccaacagcaatgcctataaggataatcgcagtcatttatttacttttgaaataattggaatgaaatgattagaaagatcataggggagacccaggagtccttaataatattaaggtacatgttttatttcttcagaacagtgctatagcaatgaattagagcacatacgtggtaaacacttagaaatatcatttggcagtgtgttgaacattgaagctgctactgcttttctttttcatacggcccatcaggtggtcactgttgagagctgttaggttctacaaattattgctcaagaaaaatatattggttaagcaaaagaattaaatattttttgcatatcttaacagccccctctatcactagagattaatgattaaacattcttatcagcaacttagtgttattaaagctaatggtttattcagaaactaaaatatatcatgaaagtttttgaggaagctgagagtgctcagacagtaaaaatagatacatagatagatagaaggttcaggtgactgctcaaacaaagtcatttagtttgaggtttaatttttaaaaataattttggtgaagcatcttaagtctaatcctgtgaaataaaatccattctatagccccagccactcaagaggccaaggcaggaggatcacttgagccaggagtttgcgtacagcctgggcaatatagtgagactctgtctctttaaaaaaaaagaaaaaaaatccttgttacaaatataatttgttataataactaattttttccaaacctaaattttgttaaaaaaatttaatcttctttttaggatggtatcgacaatgcaacattattccttatagcaaagatgttgacctaggaatttttatacaagattacaaatctgatattattttagcatttcaggatgcaggacttccgctcaaacacaaatttgggaaggtcagtaacaaaagtcggcttcatttcataagtaacatatctcacttgtaaagtttacattaagcaactcagatatggttaagaatgctacatacataattttatcactcagtattgactaggatgagttcagcagaagcctgttaccacttgtaatttctgcactgtctaggcaaaagcaagaaaatctggctttctactgggttggtgcaaaagtaattgtggtttttgccattacttttgcaccaataatgataagaaaagaaggatcttgaactcttataggtgaatgtattgctattatattaggcaacaatgtaatataaaatcaatataatgtataatatacaattaataagtaagaatcccacccgccgtacctgattgtttctcatgagtcatttaatttacagatgtcattatcaacataaaatattccattgattgctaagggatagaaatatagaatcatttcaaataagtacttcaatttcttgtttatcttatatgtcctaggctatagcagtttgctcagacatcaactagggataggtcattggggcctagatgaaatctccctctagacaatttgattcctatgccctaagcccatgatctcttgcaatcatcttgttcttaatttgcttgtcccctcggaggtgttaccctacaagcaagtaaaaatatgtttagtcggctgggcgcggtggctcacgcctgtaatcccagcactatgggaggccgaggcgggtggatcatgaggtcaggagatcgagaccacagtgaaaccccatctctactaaaaatacaaaaaaaattagccgggcgcggtggcgggcgcctgtagtcccagctactggggaggctgaggcaggagaatggcgtgaacctgggaggcggagcttgcagtgagctgagatcgcgccactgcactccagcctgggcgacagagcaagactccgtcttaaaaaaaaaaaaaaaaagtttagtcaccagaaaattattttttccatcataaatagttattttatgttactaaaaaatataaataaaatattttactgaggtcaaagtcaaataacagagctctagttattcagcaaacatttaccaaacattcactataagtatggcactgtcctctgcacctgggagacaaagatgaataaatgatagttcttacccttgagaagctcactgtctaattgggagggggaaaggctgcataaataattctgtgatgagtgctgtggcggacagatgtaccaagtccaatgggaacgtaattatttgtatgataagttttctttagggaaatgttctcagaattatttatttttttaccttaacttttatttttttcttttttccatgtgtgtagtataatgagctagactatttatgtatgtggctatgaggaatgccactttacttaagtacttattgattgttatgagagacttatttcctgatagttttatttggattattaaaggaaataatatttctttggttcttttccttttttagtcagaaagctgctctggaataggatatttctattttttttctgcagtgataattaccataagtcatttactctgagttatcatcaattgtaagaaacattattttagatgcagttaagaaattaaatgatatgttactgatgcatcccaatttcagaggtgccttaacttgaaaaaatgtgcatcttagaatgaatactctatgtatgtaaaacttaagaatctgtttctttatttttattttttaaaaaaaggtttttaaaaatgtatttcctttgtttcagtgtgtgaaggttttcatcttccccataggtagaagacagcttggaactatccttccagggaaaagatgatgtaaaacttgatgtttttttcttctatgaagaaactgatcacatgtggaatggaggcactcaggccaaaacaggaaaaaaattcaagtatgaatcaaataagtacttatttataaaggtactacagaaataatttcaggaggtagaaataaagaagtaactgaaaagaaaaccaaaaatctctttcaagactccattattagctaacactttcttagcttacccatagagtccagttatgcctgtgaagtaagaatacctgtaaggacggtttgtgaggaggaagtgtccctgggtttgtcagtccaagttgatgatacagctggtctattctcagttctgagagagagaatgagaatgagaacctgaagagcatgggttttagagtcaggctgacctgggaaaccttagctccaccctaatttgtggcctttagattttctgaacgtaatcattttatccattacattgagtaatactactgtgtgtcaggcactattctgaacgttttacatatattaacccatctagtcctcaaaataaccttcagaggtagatattctgaagccagtgtgattgctgttgaatctcagctctttattttaccagctatattaccttgagcaagttatttaacctctctgcctaagtttcctcagctgtaaaatggaaattatagtagaaattgccacatagagtggttttaaggattaaaagaattaatacacaaaaagagctttgaggtgtgtcaggaggtcctgggtgctaagtaattattacctgctgttactaatactactatagtagtagtagtagtagtagtagtagtagtagtagtagtagtagtaaagaaaactatttctcttcttattctcatgagaaatttacagattagagacatgtataattatctcaatattaaactgttacatctattcttagagaacttctgtaagagtgtcaccttttttctaagaaagataatttctagagccagtattagagtcctgttattcttaaattactttctaaggcttgaattttttctctcactgacatgatccgaaacctgcaaacctcaaaagaactgttcatttccaactactacatttctggagagaaaaagcttctttcattctgctttaacagctctttatagtagcagtgtttgggaagtgtgaagtgttctgattatttaacaagagaaatgagcagtgatagaactgtctggacagatggtgtgagtcccagattttctatcatgttactgtgaccttaaaaggcagagaaaagaacaggagatggctgagtagagtagtttctttggaagattcccccagccatatgccatttttattcttttcggcactatttactttaagaaaatgtagtatttttaacactactattccttggggatgaagaaaaacaaaatgtttaaagctagttcaagggtctttttaatgtattttaaatttttgaatagattatacattacatagttaaaatattcaaagaatataaaggatgtgtatgaaaagttaacctttctccatcctctgcccctcattttcccgtttctagttgccctttacagagataaccatgattactcatttcttatgtatcctttccgagacaaacatatgctcgtatacatatagtatttacgttcatctctccccctttacacaaatagtattatggcatattacacactgtctgtatgttcttttcctcacatagctatgtatcttggaaaatgttccaaatgagtatgtatagaaatagctgcattttattccattgtatggcaataccataatttattcaaccaattccctattgatgaatatttaggctgtttccagtagtttactgtgaccctcagttctgcagtcactatctctgtccatatgtctttatgcacacgtgtgaaaccctgtgcaggataaagtattagactcaaattttggggctaaagggaatataagcatatttcaattttgatagatattgccaaattgccctccaaagatgtttccccaatttatattctcaaccacatggtttgagaatatgggtttattttttaaaagtgcactatctgtaaagagaggtaaacttgctcaatatttgccactaatcagtaacttatcaattacttgtaatcagtaactaaatctaccatacaccaaatataattgggagcacattagaattactgttcaaactagtcagtataatgtatcatctcaccttctccaaaggtctttttgtctttataataacctattttttattttatatatagttcattctgagaaaagcttaataatatagaatgcttactattttttaaaaggcagaagaggaactcaagaaggaagaaaaaagattttctttctaaactactctgcaggactatagaatgatatctttggtcctaagatttaacagtatattaagagtaataaaaaagataaagcttccaggatatctgctacctatcaggcactgtgataggtagttcatatatatatttatatatataatctggttaatcctcatactatccctgtgggttcggtattctcacctccagttagacattaggaaactaaagctcagagtgaagtaacttactcgaggcttttgactgttaatggcaagatcaagatttaatgccagacctgtttgacccctaagcctaaatgctttcttcttagagttaataggttaagtgagttagtacatctaatgcatttagaacagtacctggcacattgtaagtattgtgtaagtagtagctactgtcagtactgtattattattattactgttactgttattataattaccatgctgcactggcataaggtatggtactttcagcacagtggtaaattggattagtaattttctaggcaggcatattttcttcctccgtctcatgatactcattccgtctttagttctcagtctttcacttctttataggaagcccttcttttacctgaaatccaaattccatttaaaaatattgactggattctttattctgtttttctccagcatccaaatctgccagtaataaaagtgatgaatataataactatgcctccagaatgtgaagttcttaattcaacttcacatttcctaaagatgctgcctagatttatttggtttgcttctttccttcccattttgaatcaactggtatgggtagaagccagaagtttgaaaggtaataataatagttaactttattgaatacttactataagccaatcaatatgccaagcttttatatgtgttatcttatttaatcctcacaataagtttataaaggagattttatcatcatcacctttattttatggatgagcaaattaaggcagacctgagtcagacctaggtgtgtatcacttcagagcccatgttcttactaagttagtgtcaccatgatctctatcatgttgttaataccccttccatgaaaacattatcagggtaatacaactactgctacatcctctaataggaaatctactccttgggctagtagtgggttccttataccttctgacagttgcagcttctgattattggatagatcttcagaaaattcagattcatcctctgtggaccacactcccatccaggtgtggatcctgtgtaatttatcacttcatttctgtaaaatgtatttaccaactgctatgtgctaaggatactgatgtgactgtaacttagtttctgctcttaaggatctcatgatctagaccatgagacatgttaaagtactctgatagcagtactgtaatcaaatatgtataatctatagttgaagtaccaaatcagccatatctagaaacaatggcaaagaagtgtggcttacaagtagagaaatttgttaggtagacttaggagaaatgtgggaaaagtcctaaaaatagatttatttaatgatttttaaattagtttatttctattttttaatttaaaaaattctgtgggcatctgtatacgtaaagtaaaaactttaaggggttgtttccttcaatagatacccaaaggtagaattattaagtcaaaagatatgagccttttaaagagttttgatacatattgccaggttgcattcctaaaaagttatgcaaaattttatacagtcaccaacataaatgagcatgcttagtttgctatatcatactgagtgttgcattgtactcacagtcattcatgactcccctgatagtttctttgagtaacttttcttttcactttcttcttattatcccaaggtatcttctatcataaaaccaggtcagtcattagtagcaagttaccaacaattattacctttctggccaggcacagtggctcatgcctttaatcccagcacttcgggaggccaaggtgagagaactgcttgagcacgggagtttgagaccagcttgggcaacagaataaaccctggctttatataaaaattttttaaaaattacccaggcatggtggcatgtgtctgtggtcccaactacatgggaggctgagacggtaggatcacctgagcccaggaaatctaggctgcagtgagccacatttgcaccactgtactccagcctaggtgacagagcaaaaccaaaaaaaaaaaaaaaaaagaaaaagaatcattacttttctcttaactattcctaacatcaactggcttttagtatacatctaaccccctccctgtcgtcccagtctccctttcaaaatccagctttaaaatattacagtgcattttgaatgtcttgttataggtgtttgttagacacttattatatagagacttttatatttaagctttatacaagtgtgattttagctgagtgagcccaggaattagaagacctgaattcaaatctgagttctatttttttgtgtcatataaccttctgagcttcagatttctcctcttaaaatgggaataacactgcgtacttcacagggtataatgcttcgattaaatactgtgtagttacctgattcagtgcttggcacgtaatagattcacaactgtttgctaattctaaattaggcaggcagagcatagaagtctgattaggaagattcattgctaggtagcaattagaaaaaaaatcacatggtagtgaattaaagcctaccaaatgttacagagatgaatataaacttgtattacatataactgcagagagatatagtttataggaaaaaaacgtgtaaagagtactgattctttggaagttttctctgaaagtgagggttgagtcagcacaatttgaatgaatattgttgaatggggaattgctattaagttagatttggttgcctctaggaaaagagacttagggccatgtaaagatgatatttggcaatgctggtaaactggttaattgccagaaagtcttgttgtttggtggggtttttgactggatgtaataaagaatctctctcataaggcttttggtggagaatgtagtaagacacaagtcctgttgaggaatattgttcttgctagtgtgtgtaggcatggaaagctggtatagtgaggaagacttgggtggttgaggacctatgctaaacaggaggtgaccggaagaaatggtaaaagaacttagcaccatgcctggctgtgaacaaggggagtccaagaaaactaagtgtccaaaataacatataagtttataatcttagagctagagaaaaattaggaaatagtggattattatgtttttaattgaagtgtaacatacatacagaaaactatacaaagcaaatgtatggctccaagaattatcaaatgaacaaatgtgtaaccagcaccccagtaaaaaaaaaaaagtatttgtcagcaccccagaaacccatatcattttccctcacgatcatagctcctgtttcccacaaggtaacagcgatgctaacttctggtattacagtttagttttacctgtttttttattttatataaactagatggtatgttgctggcttcttttcattcaacattgtatttgtgagaaccatccatatttttacatgttgtggctcttcattttctttgctgtgtagtagttaattgtatgaatatatcacaaatatttattaagtccactaacccaaatagtagttggatatttgggttgttttcaatttggggctattataggtgatgctgtagtgaacatttctgtacgtgtcttttagtgccctggtacatgcttatcttagtttgctcaggctgctataacaaaataccataaactgggtggctcataaacagaaatttatttctcaggtttctggatgatgggaagtccaagataaaggtaccagcatggtcaggttctggtgaaggccctcctcctggttgtagactgctgatttctcctcacatggtgaaaggagcaatcaagctcccttaggccttttttataaagtttccattcctgagtgtttcaccctcatgacctaatcacctcccaaaggtcttacctcttaataccgtcaccttggaggttaggatttcagcatatgaattttgaggagacataaacattcaaaccacagcaatgtttttctattgggtttacacataaagtttgggattgcttggtcgtagggtattcttgtgttcaatttcagcatattgtttacaaatagttttccaaagttattccaagttatattccagtatgttatagaactttccattgccccacatttttaccaacgcttggcattgtcagacttcttaatttgtaaccattttggtaggtgtgtagtgttaccaaattgtagtttagatttctttttccttgacttaatgaaggcaagttcatgtttactgaccatttggatatcctcttttgtgagttactggctgagtatcttgtcagggtttttttctgagttgtctgtctttttcttacttgaaaatatcttctcccaatttgtgcctttcttctttattcttttttttttttttttgagacagagttgtcacccaggctggagtgcagtggtgtgatcttggctcactgcaacctccacctcccaggttcaagcagttctcatgcctcagcctcctaagtagctggaattacaggcacattccatcatacccagctatttttgtatttttagtagagatggggtttcaccatgttgcccaggctagtctcaaacccctgacctcaagtaatctgccctcctcggcctcctaaagtgattggaatacaggcatgagctgccatgccagcccttctttactctcttaatagtgatttttggtgaataaaaagttattttaatgtagttcagtttatctattatgggtagtattatcgtgtcctgtttaagaaatctttccctatcccaagataatgaagctattcctcttgtactaccttctagaaactttattgttctatatgtaatatgaagtaaagatcaaatttagactctatactttatttggattcactagcttttctaccaatgtgctttttctgttctaagatctaatccaggataccacattgcatttagacactctaccttttgaaactttattttggtccaagattttaagcttgtcactagtaatactagattatcatacatcactgcatgtcccacttctgctcattcaagggccttacgttgctgtctgtttgaactagcttcttggtaccttgatctggaaataatcttctcttcctctgcatttctatagattttctttttctttccctctctcatgctttattggagtacttttgctgatttgtctgtcctttctatgtgatagataaaatcaggcctggtacatgtttggctaagtgagacctgagccctacatgaaactaagtcagatcctcttaagtgtagtctacactgttttgttaagatgataaggtgacactgggttgatgacttgatccaacctaacgtggttggagaattaaaactatagaattaagttagcctagttgttttcaatcattctgcttcacaagaagttaaaagactagaggtatttgttgaatcctcactcattgtctctctcagcttcacagattgatactgtgctcctacagttgtaactccaagaaacacatttgtctttttagtacttacagctgtgaagctaaaggcaaatttgaataatttctttaaatgagtgtatttaaaacattgacttttctatgaatgatctcgtattttctgctctgtttatgcgtttatattttacaacatacagattatgtcttaggtctccttaattatacctccaaaccgctagtaagtagcaggtgcaaaattgaggaattgagggaagaactttgaatgcatgttatatgggaattgtatacttatacaatatgtagaagtagcagttatttatatagcaagctttgtttatttttttaagagaagattgcctccagatgaataagcagtaaatctttcatttatgtgaagtaagttatgttttttaaaactgtcgaatagtttgttgtttgaacataattctataagatattatataggatagtattctaagagaaataaaagcatattttcagtaaaagacttgtacacagatgtttatagcagtcttactcatactagcaagaaatggaagcaacccaaatgcccatcttctggtgactagttataaaattatgatatattcaaacaatggactaccactgaacaatgaatagcaatgaactactgataaatgcaataacatggatgaatttctaaaacatgatgctaagtgaaagaagtcagataggaagagtatatactgtgtacttgctgttatttgaaattgcacaggaaaaaccaaccaacagtgtaataagattagtggttgcctaggaccagggtgggttgattgcttgactgacaaggggcacagggaactttggacgaggggttggtagaaatgttctatatcttgattattgtggttacacaggtatatacatttatcaaaactcatcacttaagatagatgcatttcattatacttaacttatacctcaaaagaagttaccttaaaagtttaagactgggcacagtaacccatcagcatttggggaagacccggtgagaggatcacttgagcccaggagttcaagataagcctgggcaacatagggagaccccatgtctacaaaaaaataaaaactaaacttaaaaaaggttaaaaagataaaaaacagtttgtgacttagaaaactgatgctaagagaaaaagggtctgagatcacaggttgaaacagagggatatatgggaccaaaagcaatgaatttggtcagggcagacctaattgcaatgataaactttgagactttcacatatgattaaacaaattgtgtaatctgatagtaaagccttttgtattgagtatgaaaattgaaactataatttaattcttttaaaaattatccattatatacaaggagaaatcctgtaaaagtctgaaggaaagcaagcacaactggagtctaactggttgttgaagtgctattagatctagttctgggaagttatgtggttatgtagagctatagagtttttggaagttatgtagttatgtcccaaggctttgtcctctggcattgaggaaaactttagtacttgttttaaattgatagtttttaatgtagtcattatgtgtatgtatatatacatgctgctctaaagacacatgcacacatatgtttattgtggcactattcacaatagcaaagacttggaaccaacccaaatgtccatcaatgatagaatggattaagaaaatgtggcacatatacaccatggaatactatgcagccataaaaaaggacaagttcatgtcctttgtagggacatggatgaagctggaaaccatcattctcagcaaactatcgcaaggacagaaaaccaaacactgcatgttctcacttataggtgggaattgaacaatgagaacacttggacacagggtggggaacatcacacaatcacacactggggcctgtcgtggggtagggggagaggggagggatagcattaggagatatacctaatgtaaaggacgagttaatgggtgcagcacaccaacatggcacatgtatacatatgtaacaaactggcacgttgtgcacatgtaccctagaacttcaagtataattaaaaaaaagaaaaaagaaaaatctgggatggctggctttagtttatactcagctgtgttacattaactctctcaaaacaaaatgcggtagataactaggtcaataaatgtgatcattagttaaaatgtgaaaatgataaaattttctagaaaaataaataccaaaatcaactcaaaaagatctagataacctatattcattcgagacagtgaattagtaatccgaaatcctcctttctccctcttttccctaccagagtatactaaaacctagaaagtttgctgcaaagtttcactgtgccttcacagaacagattatccctgtattgtacagcttatttcaggcaatagaaaaagagaaaactaaataactattttatgagagtgatagcaaaagtggacatgaacaataccaaaaaaaattttttaagggaaattactgtctcagtgaatacagtgaaaaaatactaaatgaatagaattttgtagtgtgtacatattaatgtaattctctgtattaaaggattaaaagattaaaggaacaaaaacactatgattgttttaatagatgacattaacattttttgataaattttataattaaccaaaaggagagagacctcttagcaaatttggattaaaaggaatctaggctgggcatggtggctcacatctgtaatctcaacatttagggaggccgaggcaggtggatcacttgaggcaggaggtcaagaccagactggccaacatggtgataccccaactctactaaaaatagaaaaattagccaggtgtggtggtgtgcgcctgtaatcccagccactccagaggctgaggcaggagaattgcttgaacccgagaggtggaggttgcagtgagctgaggtcgcaccactgtactccagcctgggtgacaaagcgagactgtctcaaacaaacaaacaaaaaaatctgaaatttcttttacctaataaagagaatataacaaaaacctagagtgagcaatcatgtttaatgataaaactttagaagcccttccattaaaatcagaaaaacgttaggaatgtgtgctagccctgcttctattaaacaatatgctagagggcttaggcactggaataacatgagaagaaattaaaagttaaaagaagagaaaaaattggtagtgagaataaaccatttatgttttgtaggaaattcttgtcaagaatggctctactgctccaattctagagttaatgtaaaacttaagtttaaaaaagccaggttcgggaacaggcaacctacaaaatgggagaaaatttttgcaacctactcatctgacaaagggctaatatccacaatctacaatgaactcaaacaaatttacaagaaaaaaacaaacaaccccatcaaaaagtgggtgaaggacatgaacagacacttctcaaaaaaagacatttatgcagccaaaaaacacatgaaaaaatgctcatcatcactggccatcagagaaatgcaaatcaaaaccacaatgagataccatctcacaccagttagaatggcaatcattaaaaagtcaggaaacaacaggtgctggagaggatgtggagaaataggaacacttttacactgttggtgggactgtaaactagttcaaccattgtggaagtcagtgtggcgactcctcagggatctagaactggaaataccatttgacccagccatcccattactgggtatatacccaaaggactataaatcatgctgctataaagacacatgcacccgtatgtttattgcggcattattcacaatagcaaagacttggaaccaacccaaatgtccaacaatgatagactggattaagaaaatgtggcacatatacaccatggaatactatgcagccataaaaaaggatgagttcatgtcctttgtagggacatggatgaaactggaaatcatcattctcagtaaactatcgcaagaacaaaaaaccaaacaccgcatattctcactcataggtgggaactgaacaatgagatcacatggacacaggaaggggaatatcacactctggggactgttgtggggtggtgggaggcgggagggatagcatcgggagatatacctaatgctagatgacgagttagtgggtgcagtgcaccagcatggcacatgtatacatatgtaactaacctgcacaatgtgcacatgtaccctaaaacttaaaagtataataaaaaaaaatatatatatatataaaaataaaaaataaaataaataaaaaagccaggttcagttatagttgatgttgtctctatctctctgagcctagtaataataaaacactgttggttctgggatagtggaagaacttccttttcatttagcagttgtattcataggttgtgcttaaactgattgtaattaaactgatgaaattatccaactaccaccaagtagttgtatagattttaaggatatctgtgagggaaaaaaatggtctattccaattattgaactactgttttatgtaaaaataatatgaaataaaagtggtatgaaatagaaaatggatggaaggatttttttgtggtaataatatctcttaaacttatattctgatttagggttgccttagtctgcatttaaacctgttcacatgctggatccaatcccagggccttaaagtacaaactgcttagccgaacttagtcttagctttaaaagccaaggtaacattgcagacccatggtgtattttagtcttagtcattatttactggtagcctggacagagtgcatggcatgtgctgttctgtgtcattcactctccttcacttcctccctacaatcctattttataatcagtttttacattttattgtttgtttatctttcctcttaggaagctgggattttctttttgctgaatggattgaaaaataattggggaaaaggaaaccacaaagagtttagagaggtttctgttaagtacaaaaattaacatttgagttaaattgtcttcgaattattttcacattatttatatatttaaaatgttttggctttgctcataaattcttcattgttcaaaacattgcttttgtaaaatttgtagtattccctttcaccttatctatcctgtatctattattatttttccctctttcagctttttgatgagaccacaaaggataatacttagaggagtttcctggcctgtattacaagatagaccatgagttctgcctcaattcaacttcattgtgtcaacttgataggataagacaggtggacattctgctaaccagcatctgattagagagggtggaggctggtgatggattgttaggtgtgatgacaaaataagcaattccgttaacatgagtgtgcagagtaaaattgggaccagcagatggtggggctaagctgtatcttatttctcagctatgagattttccgtggccaccttttcacagtagccagctgggattgtccattaactgggtttgagtaaaagggagttgttgctttctttagaatttgttcagcctctccttttcatgtatggctttatgttcatttggtagtaaaacacgatattcaaaggcagaatatatgagaactgaccttttcttggagaacatcccagttagatcccatttccacaatatgattacactttgaaatctggcttttccctgttctttctttaatcctctgatattttaaattcctgtaatctctgctattgccactttaaacctcattactgaaagttcttcccacactgaaacacttctcagaaaaaaaatgcagaatatagagcagagctataatataaacttaaacagacctgctagttttagctttcttttctagtatacataatttagtttacttgatccaaaggatctttaagaaacatgttttggtttaatttctgtttgttttgtttttttttttgagacagggtctcactgtgtcacccgggctggagtgcagtggcgtgatcttggctcactgcaacctccacctccagggttcaagtgattctcctgcctcagcctcctgagtagctgggacgacaggagtgtgccaccacacccagctaatttctttgtatttttagtagagatggggtttcgtcatgttggccgggctggtctcgaacttctggcctcaagtgatctacctgcctcagcctcccaaagagctgggattacaggcgggagccaccacgaccggcctggtttaatttctaaaacttacctactaatcgacttagttctgcaataaatatagttacaatcattataactagtattccttgggctggtttaaagatgttctttagcatttgagatgaaaggcagaaaccacaggtaggatcatgtaagctatggaaccaaaggaaaagcctggaaatgcaacttggagtcctgcttactctgtatccttggaaaatccagattgtgaaagaaaagaaaaagatcattttcatccatcttttgacagctttctactttgacacttctttcctctacagttccaacagaaagcccaaggctgactttgatttgcctgacttgggtatgttcccatccctgcctcaatcattaacttactggcctgagtcttagtgatggggtcagcctctcctcaatcctatgagcttggaacaggaaaggaaaattggagaagaggaaagggattctggacagtcaaaaataattaaatatccactctcttcccaaagctgtgtaatgggagagcactgtccttcagccaataatgcactagcagctagattccttagctagaccttcttccactgttgaagcctaatccctctgttttgctgcagatacctgtttccgaagtttacactgtgctggactgagtttgtagacatgaaggtccatgtaccctgtgaaaccctcgaatacattgaagccaactatggtaagacctggaagattcctgtaaagacgtgggactggaagcgctctcctcccaatgtgcaacccaatggaatctggcctatttctgagtgggatgaggttatccagttatattgagatagtaggttgaaatgggagaatttctcttttggaaaaaaaggtagataactgtttaaaaaatacatgtctatttgtcaaacataagtgggaaccaaagaaaaaatgtgacaagtttgaagacacagaaagagtcatctgatgtaattctctcacttagtactgaggaattttcatgtgccacatacaatgctaggttacagtggagaagcctagatgaatgagacaaatacctacttcttttattcctccttttggtaaacaactcaattttcctttgagggaaccctcccccaccctttgaagagttcaagttctgtacaggtttttaaaacgtgaagtaatgtttgaactggaagatgagctcaccaggcaaagctaaggaaggatatactagttgaaaagaataacccactcctcttctgggcatttaagctggtatgttagtgctacttttaagattgtggagtctgagttaatattcaagtgatcagactttgagtgacatcaagaaaagatgatatcaggttcatttttcaactaatcttatgtggaattgaattagagaacaaggcattattcttttagggaaggtgagagcttatttgtatcagagcttattacttgtcaggataagtaaatttctgtacatgtactgttttcatatgtgaagtgagaagaaactttatgcttgtttaatgcttaaatttccatccattgtgagaatattttcactgacctctgatggcacttgttgacaaatcattcaagtgagaccatgttactagacatgatcttgaaagaggccatgatttcacaaaactcatttttattttattctcagacagtctgttaggtaaaaatatgagaaattcatgtacattttatattttctgaatttataatctgtgcactcccaattttaatgacactaaaatattaatagaattttttaaatatactctaatttttaaaacatactctttattatcttcatttatcaattacagcttcgtatctctaatttatggtctatataccaatttaaatggcatgtaaacctgcctgtttcttctcctcttctaatatatcagatctccaaaatggaagctaaatggtggacttgacaactattcaccctacctcagatcatagagtttgtaaagtttgtgtccctccccagtttttcagtctgttgaatgtcgatggggcaagaactcagacttctactttaccaagtaccacacactctggaatgctttagtttccttttcccctcaagatgtctgagtcagctaggatgctgtttaccccatctctctcttatatcacttgaatgatatattgtaagtgagaggtaaaggaaaatgtaggcacaataagcactgctatttttctctttgtctaggaaaggaagctgaatcttatatcttatctatgctatttaggactactttctggagcttggcagattttcctctgacaccagagaacaatagtagtctcaagaatggaaacctgaatgtctgagggaatgggctggtagactttttcgaaaacaaattagagaaagtaacttacaaccacccattccggatttgtaaagcaacatgaaaacctttgataaatgataaccaacagtcttctgtcctaatttgcattctcaatgcagaattattgggtctttcataaataacatgagtggtttctggagacatttaagattgtcagcaaacttgtcccaaaatggcacatcatcataatccattttctctttgctagaaaatcagcccatagagtgcattcccaaattctaaatagctgaccctaaattcatttttcatgcttaaaaataatagaacaaataataatactatttttgggcaaaatccaccctacttgatgaggaccatttgcttgtgctcagtatttagaaatgcatacactccacatttctccccatttccaattgggactcccattctttgccaggagatcttacccatcccttttcagattaatcttttatcctttcctgaagtacaaagtcttaagagtgtctgaaatccaagacatcttggcccaattgacacaggttctatattcttccctacatagaccactggctgctgaaatacttttcttgtcttctggtttcacaggcttcagctcatgggttccaccctaacttggggaaacaaaagccttctctagaatctgaaggccaggcttacctctgattctgattcatccatacttcatcttatgtattttaacagttgggttctgtggagtgtccagagaccttgggttaggtatatccatcttcagtacctcattggatcacttttctttcatcacttgagtattctagcagtcattctcctaatctgaccactttcaggtttagtttacctggcttacctggggaagttgacaacttgttggtagttaggcacccatgaatgtctccagagacatcctgagaggcaagattcctcttaattgataaccaggacaaccaggtagtcacccagtcctctctaagcagggagcacttgtccttctctcctctgctgcagctactgatatctggcccctggaataaaaccatagttcctaaaattgagcatccctaagagtagctgcttggtgggacagctgatttctttgattccctagctgcaaaacctgaaattgaccactaggtgacagaatgtttgccagtatccccacaaaacaagttaaaacttaagtgaaaatcattctgcttttgaatcttaaaagctagaaaaaccataatgtaatattctttttaaaccctcttattttataactaaataaataatcacagaaaagaatgatctgaacaagaacagctgaggctaaaacccaagactgccgtgactcctagtccaatgtctgtttcgcatcacaacacagtatctttaacagtgcttgagatgcttaacagagaaggcatccagtgcttcattgaggctaagtctcagggtgtttctgccgcttagtatctttttgttcagattgagaacctaaggcgacagagaggtcaaggggaagtattttctagttcagaattcagaattcttaggcaaccttcatacctttatctggaaaatgccttctctccagacaataagacagttcacatctggagacatcagcctttggtacctaattctctaagctcaagatgcatcccattgccactttaccattctatttcccaagggaaccatcagcaccaacctgctaaatgcctgtatttgaagtctctccccttcctgaagtgaccttttatgaggctctttccttcctaagggacctttccctggtagtagtggtctcattcacaaaaaagaataatagatgtaactggagtcactttgcagttttcaagattttttttttatctgcttggctggaaaggagactagagtatctagtttttagtatttaaactacttttaattatttatattgatactctctgataaatgcaggtagttaagaatagattgtactcattcctttttgagtttgtgacctcaaaccattgtttttattcttacacgactacagtacttcaaatggcacatagataggcaggatattacataggtaagcaggaatttatacattgggtaccagagctaaatctggaaaacacatttggaatgagcttccacacttcagtctaaaatctcacccaaacttatggctacatatttttctaagtttcccccctagtttcactttctggaaagtgaacagttttttaaatcctaaatgttataaatccttaggagaaatattccctcaaaacctagtcaagaaagtgccacattcccaccttctaacaggtaattattagttgtaatagctttaatgcatggaaaaacttcagttactgaccagtcaagagaatttctcaagaaaaatcccagcaacgttccctctttcctccttgtcttccactatcattaagacctgggctagatcacctctaacatctcactcagggaaggcaatgtgttgccataaaaagaccacaagcttttgagttaggcctgaatttgaatttcagcttaatcatgtgggatttatggtgggggccctttcagtctcaatttccacattagtgaactggggaaatgatacatacttctaagggtttttagggggattaaatgaagtatacagttcttagcctcaggcctaggattaagtaagtactcaagaaatgtgcaattttctagttccatgtttcttttctaatcttcaaatggaattatagaaaccatgggtcagaacatattcctttactcaaaagattgcatgactgaatttgcttaagaaaaaaaaaattgtatcaagtcattaatacaattatacattaattatattacattaatacaatatatggtttgtgaattcagagacattaccagtttgcctccttctctcaatagaacttgtattttcattttcttggttaagcagttgtctcctaatattatcccatatgctacctagtttgctggtcccaagcagtttactgtacttcactagatttggtacctgctctcccctggacttctttttcaatattctagcctttcctagatgtaaatctttacctccttgttagtgaaattagatataagccatgatttggagagggaagaaatctggaatacttaatttcatttaattatctatgctgatgaatgcctgtatcattgttaataaaggagaattgaaaatactcatttctactttctgccctcaaatttctgtttctatctcaactaggcaagaatcagcagggtgcatgatgccattttaagctgcttcacatcagactgaaatcctaattacagttcataagtgaaacagactaattcaatggcaataccttttgtataggtcctgtgcttaaaggaggcaagtataaattttctaataagaaatccctgcttcttttgggtgcagtggctcacacctgtaataccagcagtttgagaagctaaggcaggtggatcacttgaggccaggagttcgagaccagcctggccaacatagtgaaaccccgtctcttctaaaaatacaaaaaaattagctgggcatggtggtgcacgcctatagtcccagctacacaggaggctgaggcaggagaatcacttgaacccgggaagcagagtctgcagtgagccaagatcgcggcattgcacttcagcctgggcgatagagcaagactctgtctcagaaaaaaaaaaaaaggaaagaaagaaatctctgcttccgtactatcaaaacttctaccctagaataccccctggcaccttctaacccaacctaatacagagattttgtagggacccattaacaagctcctatataattataagcagctctcacagtagggttgaaagagaatataaggaaaattagaagtactgtatttttgctattggaaatgaaatattgtttcatgcacctttgaaaaaaataacaggattttacagccttctgatgattcattcaaagcatggggaatagttcatatgtttgttaaatgaaaatcttatgtagctatttgtgtgtccctcccacttcataactacaaaaacatatatatgaatttctaaacaaagtgatattttaaagatgaattgattcaatgtgtacttaccagtttactgtgtggttttatcttcaggtacagatagtttgtggtactacttgaaaatacctttaatattattttcatcagaatttgtaatatataatccagtttgggatgatgaataaaatttttctaatctcttga

SEQ ID NO: 15 - DNA, 18301 bp, Homo sapiens
  source 1..18301: mol_type = genomic DNA; note = GAA_gene
cgaccccggagtctccgcgggcggccagggcgcgcgtgcgcggaggtgagccgggccggggctgcggggcttccctgagcgcgggccgggtcggtggggcggtcggctgcccgcgcggcctctcagttgggaaagctgaggttgtcgccggggccgcgggtggaggtcggggatgaggcagcaggtaggacagtgacctcggtgacgcgaaggaccccggccacctctaggttctcctcgtccgcccgttgttcagcgagggaggctctgcgcgtgccgcagctgacggggaaactgaggcacggagcgggtgagacacctgacgtctgccccgcgctgccggcggtaacatcccagaagcgggtttgaacgtgcctagccgtgcccccagcctcttcccctgagcggagcttgagccccagacctctagtcctcccggtctttatctgagttcagcttagagatgaacggggagccgccctcctgtgctgggcttggggctggaggctgcatcttcccgtttctagggtttcctttccccttttgatcgacgcagtgctcagtcctggccgggacccgagccacctctcctgctcctgcaggacgcacatggctgggtctgaatccctggggtgaggagcaccgtggcctgagagggggcccctgggccagctctgaaatctgaatgtctcaatcacaaagacccccttaggccaggccaggggtgactgtctctggtctttgtccctggttgctggcacatagcacccgaaacccttggaaaccgagtgatgagagagccttttgctcatgaggtgactgatgaccggggacaccaggtggcttcaggatggaagcagatggccagaaagaccaaggcctgatgacgggttgggatggaaaaggggtgaggggctggagattgagtgaatcaccagtggcttagtcaaccatgcctgcacaatggaaccccgtaagaaaccacagggatcagagggcttcccgccgggttgtggaacacaccaaggcactggagggtggtgcgagcagagagcacagcatcactgcccccacctcacaccaggccctacgcatctcttccatacggctgtctgagttttatcctttgtaataaaccagcaactgtaagaaacgcactttcctgagttctgtgaccctgaagagggagtcctgggaacctctgaatttataactagttgatcgaaagtacaagtgacaacctgggatttgccattggcctctgaagtgaaggcagtgttgtgggactgagcccttaacctgtggagtctgtgctgactccaggtagtgtcaagattgaattgaattgtaggacacccagccgtgtccagaaagttgcagaattgatgggtgtgagaaaaaccctacacatttaatgtcagaagtgtgggtaaaatgtttcaccctccagcccagagagccctaatttaccagtggcccacggtggaacaccacgtccggccgggggcagagcgttcccagccaagccttctgtaacatgacatgacaggtcagactccctcgggccctgagttcacttcttcctggtatgtgaccagctcccagtaccagagaaggttgcacagtcctctgctccaaggagcttcactggccaggggctgctttctgaaatccttgcctgcctctgctccaaggcccgttcctcagagacgcagacccctctgatggctgactttggtttgaggacctctctgcatccctcccccatggccttgctcctaggacaccttcttcctcctttccctggggtcagacttgcctaggtgcggtggctctcccagccttccccacgccctccccatggtgtattacacacaccaaagggactcccctattgaaatccatgcatattgaatcgcatgtgggttccggctgctcctgggaggagccaggctaatagaatgtttgccataaaatattaatgtacagagaagcgaaacaaaggtcgttggtacttgttaaccttaccagcagaataatgaaagcgaacccccatatctcatctgcacgcgacatccttgttgtgtctgtacccgaggctccaggtgcagccactgttacagagactgtgtttcttccccatgtacctcgggggccgggaggggttctgatctgcaaagtcgccagaggttaagtcctttctctcttgtggctttgccacccctggagtgtcaccctcagctgcggtgcccaggattccccactgtggtatgtccgtgcaccagtcaataggaaagggagcaaggaaaggtactgggtccccctaaggacatacgagttgccagaatcacttccgctgacacccagtggaccaagccgcacctttatgcagaagtggggctcccagccaggcgtggtcactcctgaaatcccagcacttcggaaggccaaggggggtggatcacttgagctcaggagttcgagaccagcctgggtaacatggcaaaatcccgtctctacaaaaatacagaaaattagctgggtgcggtggtgtgtgcctacagtcccagctactcaggaggctgaagtgggaggattgcttgagtctgggaggtggaggttgcagtgagccaggatctcaccacagcactctggcccaggcgacagctgtttggcctgtttcaagtgtctacctgccttgctggtcttcctggggacattctaagcgtgtttgatttgtaacattttagcagactgtgcaagtgctctgcactcccctgctggagcttttctcgcccttccttctggccctctccccagtctagacagcagggcaacacccaccctggccaccttaccccacctgcctgggtgctgcagtgccagccgcggttgatgtctcagagctgctttgagagccccgtgagtgccgcccctcccgcctccctgctgagcccgctttcttctcccgcaggcctgtaggagctgtccaggccatctccaaccatgggagtgaggcacccgccctgctcccaccggctcctggccgtctgcgccctcgtgtccttggcaaccgctgcactcctggggcacatcctactccatgatttcctgctggttccccgagagctgagtggctcctccccagtcctggaggagactcacccagctcaccagcagggagccagcagaccagggccccgggatgcccaggcacaccccggccgtcccagagcagtgcccacacagtgcgacgtcccccccaacagccgcttcgattgcgcccctgacaaggccatcacccaggaacagtgcgaggcccgcggctgttgctacatccctgcaaagcaggggctgcagggagcccagatggggcagccctggtgcttcttcccacccagctaccccagctacaagctggagaacctgagctcctctgaaatgggctacacggccaccctgacccgtaccacccccaccttcttccccaaggacatcctgaccctgcggctggacgtgatgatggagactgagaaccgcctccacttcacggtgggcagggcaggggcgggggcggcggccagggcagagggtgcgcgtggacatcgacacccacgcacctcacaagggtggggtgcatgttgcaccactgtgtgctgggcccttgctgggagcggaggtgtgagcagacaatggcagcgcccctcggggagcagtggggacaccacggtgacaggtactccagaaggcagggctcggggctcattcatctttatgaaaaggtgggtcaggtagagtagggctgccagaggttgcgaatgaaaacaggatgcccagtaaacccgaattgcagataccccaggcatgactttgtttttttgtgtaaggatgcaaaatttgggatgtatttatactagaaaagctgcttgttgtttatctgaaattcagagttatcaggtgttctgtattttacctccatcctgggggaggcgtcctcctcctggctctgcagatgagggagccgaggctcagagaggctgaatgtgctgcccatggtcccacatccatgtgtggctgcaccaggacctgacctgtccttggcgtgcgggttgttctctggagagtaaggtggctgtggggaacatcaataaacccccatctcttctagatcaaagatccagctaacaggcgctacgaggtgcccttggagaccccgcatgtccacagccgggcaccgtccccactctacagcgtggagttctccgaggagcccttcggggtgatcgtgcgccggcagctggacggccgcgtgctgtgagttctgggctctgtgccagcatgatggggagggcgacgcgcatttctcacacggcagggagggccacacgcgtttgtttctcacacgatgggcagggcgacacatgtttgtttctcacacggcggggagggcgacgggcatttctcacagggcgctccctgggtcttttactcacataggtctaaatcccatgtaaacacgtgttcaggactcaccaagcccctgcttgtcatttaactcaggaaaactctcaggaacgacagcacttggatttgccttaatcttaagagaagttgccttcggaaatgcgtttttctttttttgctcattcatttactcagtgtccacgcactgaccctccgtgccgggtggtttggatcctgctcccggggacagacacacagtgaggggaagccataagcaagtccatgcagacacagcgtcagggagtggtcatgcagagagcacgctagaagccagctgtgcagacacggggcagggaggtcccctctagaagccagctgtgcagacgcaggggacagggatggcctctctggaagccagctgtgcagatgttgggggcaggggtggcctctctggaagccagctgtgcaggagtggggggtggggaggccactctggaaaccagctgtgcagatgcaggggacaggggtggcctctctgagctgacctctgagtagagagacccaagagaagtttctcaaagcatcttatcaagctaggtatggtggttcatgtctgcaattccagcactttgggaggccaaggcgagagggtcacttgagcccaggagttcaagaccatcctgggcaacatagcaagaccccatctcttaaaaaataaaaataaaaaattagctgggaattgtggcacatgcctgtggtcccagctactcaggaggctgaggcaagaggatcccttgagcccaggggttcgaggttgcagtgaaccatgattttgccactgcacttcagccttgctgaagaccccgtctcaaaaaacaaacaacaaacaggcatcttatcagatctcggtcttgaaagcactcagcgtagtcttgcccaggggagggtgggtgcggtgtgagcccgtcctgcgaaattagctgtgctgtgttaacagaggacgcgtcttcctgtggaccgggtttatctgcggctttcatttctcggaggtgctgtttgccttgcacttgacccccagcaaacctcaggggtccttctcaggcatggctgggctgggatctgggaggactttggccacaagctcctaggcctggaaaggttctgttcagcccctgcccagccttgcttggggtcatgggacaggcatgtgtgccagttccggtaccagccagttcctggaggtcagccccttgggggcccctcaggggtggtgtgggcccagccaggcggtgcgcctcttctgatatgccctgagagttgatcacgctggtgccagggtgccaagggctgcagggctcggcacggccgcctgtcccagggtcagtgtgctgcagggctggccaggccactccgccctcccagggcaccagggcccgggggtgctctctgggtgctctcaggctcgtgtggccccttgggtgtgagcaagcctggctggcctctgtcccgcaggctgaacacgacggtggcgcccctgttctttgcggaccagttccttcagctgtccacctcgctgccctcgcagtatatcacaggcctcgccgagcacctcagtcccctgatgctcagcaccagctggaccaggatcaccctgtggaaccgggaccttgcgcccacggtacagcggcgggcggcgggcgggggcactgagctggggagcgcaggtgctgaagcgccgtctcctgcatgtcccagcccggtgcgaacctctacgggtctcaccctttctacctggcgctggaggacggcgggtcggcacacggggtgttcctgctaaacagcaatgccatgggtaagctgcccgccgcccagcgcccgggccggggtctcctccgtgctgcctgccctggagactggaggtccgcatgaggggccctgggcacggtgctgggccttgtgttttctgggaaatgagtcctatgggctgatgcctctcccaactctggccttctgtgctcctaaggagggttctggggccctgcctggaggtgggctggcaccacatatctttccgtcccatgccaggttcctcctgagtcaggcttagcacggcttccccaggccactctgagctcctcgtggggagagagcctcaactctccgcctgtgattggcccatctgtggggtgcagagccctccaagtgaagaatctgtcccccaaccccagagctgcttcccttccagatgtggtcctgcagccgagccctgcccttagctggaggtcgacaggtgggatcctggatgtctacatcttcctgggcccagagcccaagagcgtggtgcagcagtacctggacgttgtgggtagggcctgctccctggccgcggcccccgccccaaggctccctcctccctccctcatgaagtcggcgttggcctgcaggatacccgttcatgccgccatactggggcctgggcttccacctgtgccgctggggctactcctccaccgctatcacccgccaggtggtggagaacatgaccagggcccacttccccctggtgagttggggtggtggcaggggaggcaaggggctggccgggacgcgtctcctcaggccccagcagacggtcccgtgttgtggctgcaggacgtccagtggaacgacctggactacatggactcccggagggacttcacgttcaacaaggatggcttccgggacttcccggccatggtgcaggagctgcaccagggcggccggcgctacatgatgatcgtggtgtgtgcccccacactgtgggtctttgggaagggggccgcccggtgcccagtggctccttctctgtgcagcgtcatcctcgtgcctgtgtggtcgccgaggatgttttctgagggtctttgtgatatcgagggaatatcaagaagtttgcaggcttggccccagctgtccagggaggtcgggtttgagggtccccagaaatggccgggtgctactcagggttctgtcagatgtaggttacttgaactgccttaaagcaaaaggccaggggcatgataaactgatgtcacctggtcctggaaagtggagggcccggtgggcctgggcatgggtatcgctggaactgtggaggctccgtgtgccttctggccgtgcctctccttctggccggctctgaatccctggaaaggacggcgtgagtgagggcagcttccagccctcatgctggcaccacagagcggagacttcttcccatcagctcccatagaaaagtcccaaagcaggactcttgagtcacccagcacaaagaggcccttccctgagccagtcccacagccagaaggatgcagtttgggggctggtccagcccgagtctggtgtccggcacgatggccagaggaggaggtgggaggcagggcgagctgaaaagatccaacagttcctgcccggaagatccacttcagcagaggaagcacagatgagatgtggggctgtgctgatgctgcctgtttccatccctgccttctgcaggcagcaaacagtagtagcccttaagagcaggagtggaaacacagacttttttctttctcacatttttttaattataaaagaaaagtgattactgtagaacacttgggaaactctagaggtttaaagaaaaggtaaaggtaaagcttccattccggcgcgcccctcatcagccagctggtcctgactcgcccggccctggctcctctccaggcaggcgtgtgcaggcatgtgcaggtacacaggcaggcatgctgtacacacgcatgatgtcatccccagcctcatcctctcactgtctcagttttccccgtggctggcgccagggctctgggccaccctcaccttgacaggtttccctcttcccaggatcctgccatcagcagctcgggccctgccgggagctacaggccctacgacgagggtctgcggaggggggttttcatcaccaacgagaccggccagccgctgattgggaaggtagggcgagggtccaggggacgggggttagaaagcagaggcctccagccagggggagccggcagctgctcaggaagacggtgggatttgaggagccatcacgcccagtgggacagctgagaggaatgggccacagtggcccgtgacgatggtggctcctacaaggaatggccccgtgagttcttccatcagcaggcctttgacttcatgggcagctgggcctggcccaggcacaagccctgcagaccctcagtgaggccttagggtcctccttgtcctcccagccccccaggggcctccaggcagggcccccgctgagggagcagctagggagggtctggtgcggatgtgaggctgcctggcagggcttgcacggggccgtctccgctgcccttctccctgacgctctctggttctgcagcccagcccctgggtggacgtgttgggggtgacccctcgttttcccagggttgaggccccttggccccgcatcagtgccttgtggagaaagagctgctcattgacctccagggtgcaggtctctcagatttgcaaatgtgggcgtccactaagagtgaggctgcccctctgctcaggctgaggctcagtggggcttccatgcaggccctgggtggggccgggtctccccactgcagcctctcgttgtccaggtatggcccgggtccactgccttccccgacttcaccaaccccacagccctggcctggtgggaggacatggtggctgagttccatgaccaggtgcccttcgacggcatgtggattgtaagtgtggccccctcctgagcatccccaaggcctctggggactaccccaccctcctcactctgggcagagtcacctaccagcagcgcttctcttgcaggacatgaacgagccttccaacttcatcaggggctctgaggacggctgccccaacaatgagctggagaacccaccctacgtgcctggtcagctcgccccccacctaccctggggacttaatcaaatcagagactcccttgtctggcctgggagacttagcaccctcatctctgagaagcagatgggccagcggggaaaggggcgggggggggatccccaggagaaaggctcaggctgggagactcagccaagcagtgcagacagggtgggtgcagaggcacaggccctgccggaggagacgccgctcacaggtgcttgccagagcacagtgaggccgactcgactcagagccgtctcgataggcgcagggaccatgcagcggagacctacccacccgtggggagaggtcaggcccaactcgaatgcagcacgggcaagtggatttctagccagggagcagggtgggctcagaggcaggaattaccaagaagaagcatgggggtcagggggattctggctgaactgacccagcaggattcttgctgaaggcaggccagggtgaccagacatcgcctgaggggtggtggaggttggggcttctcgccaaactgtcttagcaggaatggcagaaactgggttttacaaggaagtacaaggatgggcctgggagaaggtttgggggcctgaggctatagtttggcccagcaaagaatcagtgagaggatggggttttgggcttaggtaaacaggcaggggagtgcttgaaatgggccaagagacggtggatgtgaagtctgggggtctgcagagcccaggctccagcacccgcccagccctgtcttagaagcagtggagatgattacccaggttcccgggtaacgccagccccacagaggcgtggggagcggctgcaggtgcacctccagggccagcctgaagaggcagcgacctgcacaggggctcctgggaggtggggggcagggagggcaccttggagcctgccgggaggaagctccctggaaaccagcccccgcctcttccaggggtggttggggggaccctccaggcggccaccatctgtgcctccagccaccagtttctctccacacactacaacctgcacaacctctacggcctgaccgaagccatcgcctcccacaggtgagggccacgtcccgccccactgggctctgccctcacagcctgtcctacaaggttggggcctctgcagggcctcagggaggaggaaaagcggaggcccagaccacccggggcccgctggcggcccgagtgctctccccacccgctgcctgcaccccagcctgaagctggagcgctccttcccacttcatgcctggggcttggagaggaaggaccctggatgctgacaggagtctgcatcagcggggacctcatgactcctgtgaggctggggggggtcctggctcacctacaggcatcaggtggcccagacagaggcaactgtgcccgcagacatgggcagtagcctcgccgtcctcctccccagcctctgcctcatcccagaaagctccttgctcccagctctgccctgctggtgacagggttcccgagtgaccccgctccacacagccctcacggtgtcccccaccaccccagggcgctggtgaaggctcgggggacacgcccatttgtgatctcccgctcgacctttgctggccacggccgatacgccggccactggacgggggacgtgtggagctcctgggagcagctcgcctcctccgtgccaggtgagctcctaccaggaggggctgctcagcagagtagagccgggggcctctatgggaggcttgccggggccccccacccacttagcaggtggggctctgggtcacttggcctgagctggctctgctgcagcagcctgaggaccagcctgactctgccctcccagaaatcctgcagtttaacctgctgggggtgcctctggtcggggccgacgtctgcggcttcctgggcaacacctcagaggagctgtgtgtgcgctggacccagctgggggccttctaccccttcatgcggaaccacaacagcctgctcagtctggtagggtgggggtggcggcatggcaggtgggcgatcccacccacccaagactctcccctgggaatcccacccctgctggagaagcaccccatgctgggtggctgagaagtgcagctctcccgaggcggggactccaggggaccgcggccccagcacccaagtgcttcctttgcccccgcctgccctgcagccccaggagccgtacagcttcagcgagccggcccagcaggccatgaggaaggccctcaccctgcgctacgcactcctcccccacctctacacactgttccaccaggcccacgtcgcgggggagaccgtggcccggcccctcttcctggagtgagtgacctaggcaggggcggtggcccatgtgtgccctgggggaggggcacgtaactcccaggcagccctgtcctgctgtgggctgtgttccccaggacccagcaggttgccgctgagtgagacaacatttgggcctggcttaagggggaagggcagcaagaaaacccagtaatatcccccagacaggccgtagtacacacgaggagttcctaacaacagccctgcacatcagtgtgttgagggaggattcccagagagtgaggtgattagttaactatttgcagaagtcaatttatttttcttgcataccatagaaacataagttccagataaattaaatagttaatgtcaaaaatcaagctgtggaggccaggcacggtggctaacgcctgtaatcccagaactttgggaggctgaggcgagtggatcacctgaggtcaagagttcgaggccagcctggccaacatggtgaaacccatctctactaaaaatacaaaaattagccgtgcatggtggtgggcgcctgtagtccctgctactcaggaggctgaggccagagaatcccttgaacctgggaggaggagattgcagtgagccgagatcgcgccactgtactccagcctgtgtgactccatctcaaaaaaaaaaaaccaagctgtgaaagactccacaggaaaagataagtgaatgtgtatctctggggaaaggtttcatttagagaaaaaaaaaaaaaaaaggtgaactttatttgaccatagcagaaaaaaaaatgtaaatctctgaatataaacacaaaaagattaaaactgctctgaacatggactgtaacagcagagaaggcattgtcaataaaacagcaaatagctactcttcctaataggtagagaactcatacgttggtaagaccaagactaagaaccaaattggaggaacactgtttgcaaaacaggagatacgaatggtatccacacattcttcacccggaaatccaagaaacgcaatttgtgttttaattactattttaatgaccttgttgtttctgtcactacacttttttttttttttttttagtggttgccctagggattacaattaacatcttaattttagcctcgttggaactgatgccaacttgctttcaatagcataaaaaagctttgcttctatgtggtttccattgcctctcgttcctctgtgctgttacacgtctgtatccatgatgagcccatccacgcagatttataatgaccgccttattcaattatcttttaagtcaaataggagggaaaaatgggttacaaacaaaaagtacatacacactgtctgccttttatatttactgatgtagttacctttacccatggttttatttcttcatgtggctttgacttcttgtctaacatctttcatttacagcagaaggactccctttagtatttattgtagggcagttctgctagtgatgaattctctcagtttttgttgacttcagagtctcttaatttctccttcattttttgaaagttctgctcaacgtagggttcttgactggcggtcgtttctctgaacactttgaacttgtcagcccatggcctccgtggtttctgctgagtagcttctgtcttgcctcttcccagattctctgtctttggcctttgaagtcccgatggtgtgtctaggtgtagatctctgagtttatcttactgggagtttgttgagcttcttggacgtatgcattgatgtttttcatcaaacttgggcggtttttcagccattacttcataaaatattttttctgcccctttctgtcttctactctgggacttccgttccacacattggtatgcttgacggtgcccaggggtctttgcagctctgttgactccttcctcgttgtgttttctttctgttcttcagactgcttagtctgactgccctgtcttcaaggtcactgattcttttttccaccagttctcatctgctgttgagcccctctagtgaacttctcattttagttgctctcttttcaactccagaatttctgtttcattcctttacgtttctctcgttaaggatattccctatctggtgagtcatgttctcacactttcctttagttcttcagacacggtttcgctgagctctttgaacacatttaaagtagctgacgtaaactctttgtctagtaagtccaatgtctgggcttctctagggacaatttttattaactactgtccccccatctgtgggccatactttcttgtttctttgcgtgtctcatacatttttgtttcagactggacattttaaacgcagctgctgtggtcatcagattccccatccccctcaggtctcgttgctattgctgattgttttgtgactttcttgagctaattccataaggtctgtgttcttcattgtgtgtggccaccaaagtctctgcttgactagcttagtggacagccaataattggtcagatatccttcacagatggcatccgtgagtctcccagcctttgctggggcgaggtggggagcaccgtcaacacttagctaggccaaggattcttgctgttcttacaaagattcagccattttgttaaatacatgctccccagatggctgcaaacccttggttagtttcaagagtcctaaaaatgtcaactctgaccatttttgccgatgttcctgttttcacagaggagaggatcttgagaggggcttactccaccatcttcactgacatcactccaagaaatgtattttgcaagaaatattttgaagcagaaagacaccatttattttgcccatgaattagaatacattagagaaaataagactatcccttgctggcaagaacacagtgacacagtagggtggaatataaattggcacatttgtggaaagcaacagtacatatcagtcaatgtttttgagattcacattgatgcgttaattttacaaatagaaatagggcctaaagaagtcacctcaaaaggcatgaacgctccatgaatgtatccatgcagggatcatagctgagcactggatgccccctgcacgtccgggggcaggaaacaggacagggcagagctgcgtcacagggcaggacagtctccgttagacggagaatcctccgtagagctgcttgcacatgtacattcatctttttgtcagatgttaattcaagttgcctttggttgtgggactgggaggatcttttctctttgttgatactttttcgtactttccaaatacttgactgatgagcacatgctgccttggttaccggaggataagtgagcgagcaaagtgaggccagtgctgtgtccatcctggtgcctcaagcacaagcccctattcctgccctgagcccagctgccggcatgtccggggagaaggcttctcccagctccggcattgacttctatctgctggaatcatccctgcccgtctgacctgagtcctccaagtcctccggcaccttgagctccagagagcagaattcagcctcttcctgtgcctccccagggtgggcatatgagccagccccatcccattcatcacccgtatgcctgtgtgcccatcccccttgcaggttccccaaggactctagcacctggactgtggaccaccagctcctgtggggggaggccctgctcatcaccccagtgctccaggccgggaaggccgaagtgactggctacttccccttgggcacatggtacgacctgcagacggtgagtctggggaccctaagccctggggagacgggagaccagagcagccctcccacctgccccctccacccagttggtgtgaccaggtggcggaaagaggaacgtatgtgttgagtcccggccatgtgccaggcccccacccggctgctccgcacccatcagcctctccgctcctcacaccatccccatttcccagatgagcagactgaggcctgcttgcagaacctggccaagtcccacggccatcacaggctgtgcctgtgctgagctggcatacccaggcctctcaggcactgtccccactcagtagccaggagggtccctacctacagtgagccctgagtctgcgcctgaagtcacagttcagcccgtctgtgccaggcctcctaggcctccacgtggagccccgggagatggagagcgtggttcctgaggacagcatgggggcctcggcacggcccagaatcctcaaagcaacatctccctccaggtgccagtagaggcccttggcagcctcccacccccacctgcagctccccgtgagccagccatccacagcgaggggcagtgggtgacgctgccggcccccctggacaccatcaacgtccacctccgggctgggtacatcatccccctgcaggtacctgggccaggcggctatggtgggggtgtggacagcacactgcagagctgggggaggcacagggagatggtgggggagaggcccaggtggggcttctgaggggccgccccccgcagtgtaggttatcaaggagccagccaggccagtgaggtggggagggcacagccccacaaaggcgtggagcatggccggcaggagctcagtggtctgcatggtggaggttctgccgggcccggcctcgggcagccgtgggatagcacttgaggtggggaaggtcttgggtcatcaccacggggttccagcccctgcggccgcaggtgttcctgcagatcctagttactggcagcctggtgctgtaccagcctagcattcccgggccctggaggcctccacctccaccagggtggggatgatgacatcacgtgtccttccctttccagggccctggcctcacaaccacagagtcccgccagcagcccatggccctggctgtggccctgaccaagggtggggaggcccgaggggagctgttctgggacgatggagagagcctggaagtgctggagcgaggggcctacacacaggtcatcttcctggccaggaatgtgagtcctggggctgctcaggctggtgggcaggggccggctcggggttgagaaggggtgaggggacctgggcttgggggtcccacgatggctacctgccactaggacactctagcaggtggcctggggtcctagagtgagcagtggggccgtgcactctgccctttcgtgtacacagagggaggtcacctccctgatgccatcatgagtccctgttctcatgggtgttcctgccccagctgtctgctgacacctccacattctctgccttttcatctctctctgctcggcccagaacacgatcgtgaatgagctggtacgtgtgaccagtgagggagctggcctgcagctgcagaaggtgactgtcctgggcgtggccacggcgccccagcaggtcctctccaacggtgtccctgtctccaacttcacctacagccccgacaccaaggcaagagggcccagagtggcacagggatcgcgtcccccagccgtggtgcagggggcagaaggtgctgggcgtcctggtgaccgatgccaggaacagaggatgctgggacctcccaagggggtctttggggaggagtgggaagggtcaggccacacaggctgtgcctttcctcctcctgtgtctacacgtgggtgatggggccacaatgacgacctctgagccgtgttgaagcagcaccgcgtttctggcgtgcgttaaggtgacccgcactgagagccggggtccccctgcgcctgccggggaggaaccgggtgcgaagcatcccagggccagacggagctgccccctgagcgccgggcctcgctgctgctgggatctcggggccagatggagccgccttctgagcgctggggtctcactgctgctgggatctcgggctgctccatttgtgctctctcttttccaggtcctggacatctgtgtctcgctgttgatgggagagcagtttctcgtcagctggtgttagccgggcggagtgtgttagtctctccagagggaggctggttccccagggaagcagagcctgtgtgcgggcagcagctgtgtgcgggcctgggggttgcatgtgtcacctggagctgggcactaaccattccaagccgccgcatcgcttgtttccacctcctgggccggggctctggcccccaacgtgtctaggagagctttctccctagatcgcactgtgggccggggccctggagggctgctctgtgttaataagattgtaaggtttgccctcctcacctgttgccggcatgcgggtagtattagccacccccctccatctgttcccagcaccggagaagggggtgctcaggtggaggtgtggggtatgcacctgagctcctgcttcgcgcctgctgctctgccccaacgcgaccgctgcccggctgcccagagggctggatgcctgccggtccccgagcaagcctgggaactcaggaaaattcacaggacttgggagattctaaatcttaagtgcaattatttttaataaaaggggcatttggaatcag

SEQ ID NO: 16 - DNA, 4361 bp, Homo sapiens
  source 1..4361: mol_type = genomic DNA; note = GALT_gene
agattttccagcggatcccccggtggcctcatgtcgcgcagtggaaccgatcctcagcaacgccagcaggcgtcagaggcggacgccgcagcagcaaccttccgggcaaacggtaactgcaccgcggcagggactcgctggggcgcggagccgagccctccccttccttaggaagctttcgtcccctccgaaggttggaacgctcatcccgagccagaccgacaaggcgtacagtctgcaggcctgtacgagcagcaggccaattggcgctgggaaagtccaatcctgggcctctagctcctgagcgggacagggccgagagggcgctcccgagcttgggcctgctggtgggtgagacccaggagagagggagctagagagctctgaggactgatcttgactgtctgcccccagaccatcagcatatccgctacaacccgctgcaggatgagtgggtgctggtgtcagctcaccgcatgaagcggccctggcagggtcaagtggagccccagcttctgaagacagtgccccgccatgaccctctcaaccctctgtgtcctggggccatccgagccaacggagaggtaagcctgtagagccctgcatctgcaggctgggccacggggagtagttccctcttagaactgtcctccacccacagggatagtgaacctccttctgggtcatatcccaccaagctttttggtcccctagggtgggccttccctactcccttgtagcctgtccagtctttgaagcccaccaggtaactggtggtatggggcagtgagtgcttctagcctatccttgtcggtaggtgaatccccagtacgatagcaccttcctgtttgacaacgacttcccagctctgcagcctgatgcccccagtccaggtaacctggctccaactgctgctggggaggagggtggctagacctcttgagggacttctgctgcagagagtgatactcctttacctcaggacccagtgatcatccccttttccaagcaaagtctgctcgaggagtctggtaactatggatttcccctcttacaactttcaaaccagagttggagactcagcattggggttcggccctgcccgtagcacagccaagccctacctctcggttatcttttctcccgtcaccacccagtaaggtcatgtgcttccacccctggtcggatgtaacgctgccactcatgtcggtccctgagatccgggctgttgttgatgcatgggcctcagtcacagaggagctgggtgcccagtacccttgggtgcaggtttgtgaggtcgccccttcccctggatgggcagggagggggtgatgaagctttggttctggggagtaacatttctgtttccacagggtgtggtcaggagggagttgacttggtgtcttttggctaacagagctccgtatccctatctgatagatctttgaaaacaaaggtgccatgatgggctgttctaacccccacccccactgccaggtaagggtgtcaggggctccagtgggtttcttggctgagtctgagccagcactgtggacatgggaacaggattaatggatgggacagaggaaatatgccaatgatgtggaggcttggaggtaaaggacctgcctgttcttctctgcttttgccccttgacaggtatgggccagcagtttcctgccagatattgcccagcgtgaggagcgatctcagcaggcctataagagtcagcatggagagcccctgctaatggagtacagccgccaggagctactcaggaaggtgggagagagccaagccctgtgtccccaaggagtccctaactttcttatcccatgagagaggtgtgtaaaggagaaagctagaggtgaactagtagagagagacttgctaggaggccttagcaataatccagtaatctaaaggaaagatgatggtgacttagactcgggtggttagtggtagaggtggtgagaagacatcagatcctgggcacattcttttcttctgcttcccttgcctatttgctgaccacactccggctcctatgtcaccttgatgacttcctatccattctgtcttcctaggaacgtctggtcctaaccagtgagcactggttagtactggtccccttctgggcaacatggccctaccagacactgctgctgccccgtcggcatgtgcggcggctacctgagctgacccctgctgagcgtgatggtcagtctcccaagtaggatcctggggctaggcactggatggaggttgctcccagtagggtcagcatctggaccccaggctgagagtcaggctctgattccagatctagcctccatcatgaagaagctcttgaccaagtatgacaacctctttgagacgtcctttccctactccatgggctggcatggtgaggcttttcaagtacctatatttagccccaacaccatttctgggctcctggggctcagcctagtgaactgcaacctcaaaggagcaagccttgaaacagttgctgggggaagtggccagagtagagatgctgggactgagggtggagcagcaaacttggtgaaactacatctccaatgtgctttctaatctcctgccagctcttctcaagcaggggatcctgggagatgtagttttcagatacctggttgggtttgggagtaggtgctaacctggataactgtaaaagggctctctctccccactgtctctcttctttctgtcaggggctcccacaggatcagaggctggggccaactggaaccattggcagctgcacgctcattactaccctccgctcctgcgctctgccactgtccggaaattcatggttggctacgaaatgcttgctcaggctcagagggacctcacccctgagcaggtcaggactcagaacagtctggcgtctccagactctcacatgcagtatgtgcaggcacctgatacttctgttgcccttgtgctccagtcattgcacaaggcagaaaacagctctggcaggaagggactgccaaagttaggagccctagggcctggaaggagagtatggtcctcagatcccccttctctcctgcttcctccagggaacccaacagtcatgaccctgatagtttcccataacaacctgggcattccttgggactcaggagctgctaaactctttcatcccctggtggcttcagcagtccttatcaccagcctcacaatcccacaggcccacccccagtgggcctgtggcattcatatttcatattcatatttcaaaccacaatatccagcaaaatgtctcctgagcacccagaactccataccatcggccgggtgtggtggctcatgccttaatcccagcactttgggaggtcaagatgggaggattgcttgagcccagaagttcgagactagcctgggaaacataggaagccctcgtctctacaaaaaaaatttaaaaagttagccaggtatggtggcatatacttgtggtcccagatacttgggaggctgagataggatcacttgggcccaggagtttgaggctgcagtgagccatcatcatggcatcattgcattccagcctgggcaacagagcaagacctcgtctcaaaaaaaaaaaaaaaatgaagtccatgccaccattcttggcagcccagcccttatcctccttaattgctccctgtcccttttccaggctgcagagagactaagggcacttcctgaggttcattaccacctggggcagaaggacagggagacagcaaccatcgcctgaccacgccgaccacagggccttgaatccttttttgttttcaacagtcttgctgaattaagcagaaagggccttgaatcctggcctggaatttgggcagatatagcattaataaaactgtgcatctcaaacttttatcacatactctaatatcagaggagtgtgaaccttcagagatctagggttaaaagctaaaggcatagctccagctacaacttttctttgtctacagatgtgtaaaatcttgatgcaaaaatctaccccaaatttctgaacaaaattaatattcagtattatatctagcctatagattctcttactcttggtgtaatgacagcattcccagtttaggaaactgttttaaaatcttgtgtcttggttgtggctgaggctttgggaaggccagagccccctttgccaccacccctagggtgtcagctccaagcctgggcctgagggtttgatggggagcgggtgagctggatcctgatcccagtggtcagtggccagatcctgggctgctggccagaaccctggctttgtgagtggctgcagcttggctctgctccagcccacaggggctaaaggg

SEQ ID NO: 17 - DNA, 298440 bp, Homo sapiens
  source 1..298440: mol_type = genomic DNA; note = GHR_gene
agttgagagtgacacgcaccaactccagctcctcgccgggaagacttcatcccagcaactcggaatgcttggcccgggcggcactcggcctctccgcagcagttctcgaactggcctccttgaacgtccgcttcgccttcgcttctgcaacctggatctgggggactgcgggccaggcgcggcgtgacccctggtgaacggtggccgccttttcccacccctgccctcccatcctcccttcccgtttcaccccgccccctctctcctccccaagcctgacagcccgcgagctgccaagcagggcgcagccatgggaagaggaggagggctagggagcggcggcggcggcggcagcggcagcagcagctgctacagtggcggtggcggcggcggctgctgctgagcccgggcggcggcggggaccccgggctggggccacgcgggccggaggccccggcaccattggccccagcgcagacgcgaacccgcgctctctgatcagaggcgaagctcggaggtactggagtggggctccgggagtctggctttattttcctcctgttgtgccagggggcctgagggtgaaccctgggactctagttgtttatgaaaacgggaggatctgtcttatatatttacacggataattttttattccggatgacttggctgtgctcccctcctccttgcgaagaagttgttttctgctggtgggttgttgtaacccaatctagtgtgtgtgtgtgtgtgtgtgtgtgtgtgtgtgtgtgtgtgtgtgtgtctggaagttggtgagggcggcagggagttgcgggcgacagacgaaccatcacactctggcgtctgctctggcccgcgagtagtgtacgtggaggggtttactccggagacagttttgttaaagtcataaaagttttgctagtgtgtttctgtttgccatcatctgcctggctgcggcaggaactgccgaggctgctgctgttgcgcggggaagaatccccggcagcgcgactggagagactggggaggtcgagctgtgcgcgtggacacagcgcgcagagcgcgcggtcttttgcgcgtttgtgcgggccgcagccgcacgttggcaccgatggaactggggtcagtagagtgacagccaccagtccgcatgaactggggtaagtggaaattgtggcgagccgacctcccccagcttttgacacactagtggttgtaaaatcaaccaggcttaaagttttgacagaactgccagaggctgcgggtcaatggggtggccgcgtgtctagggagagggcgctggcggcgcagagggtgcggggcagggcacttgcgagtgcgtggggaagtctatttggggcgagtgctttatatatagcccgaggggatgcctgctgagaccgagctgcgggggctctcggtctggcgcggactgtgtgtcctgaatgagtgtacgtgtgcgctgtgtgtgcgcgcgcgagtgtgcgcctggggaggcgtgtcggcgcctgagccagtagggtgtgcagggtggaagaggccacagaggtgccgcctgtctgtttgtgccgccaggagaccttggaagggacagagaaaggtaacggaaggccaaagtgttgggaagtcagagtagtttctgcataggattaagtattaagggctttaaaataactaaacgcattgccctgagtggctgaggactggaagtgaggttttggggagttctcaggagaactgcatgggagggcgtttgggaggtctaagggatgtgtaatatgtgtgagtacagaacttcggagacagacacaggttggagctatgaatttgaaattttcagggtgctgctgtccacagtccagggactggctggtttcagaggtattcaggctccctggtgtgtgtgcctgggaagacactcatcttttcttgcagacatgggatattgtggcaggtcaggctctgtttcctgagcaactggtgttccaggctagtttccacctgaatcaccctagaagtgtcttttttctgatgataaatgttgaaacctttccagaaattaaaatgctggatagaaacaaaattgatgcagcagacaggattgttgattctatttattcagtgattgggagctctttttccttttgagaaaagcaaagctcagtgtttccagattagatttcaaggagtcttcagctatctacagcttcccttctgggcctttggatggagctggaaggatgtgttttggcctaaagacctttggaagacatcatgtgtagcttaaagaggttgtcccgtctctcatcatcttcttccacccttataaactttttgttttgcattaatctaaggaaagttggtgtgtcaacatttagcttttttttattggagtaaatatatcacagtgaaattatagttatggtctcctgaagcccatggaaagccaacacttaatgggcaaaggtgtgaaatgaaagtctataaatgcaatgacaaagtgacgagatgagtgcattcttttttcaaaatgaacataactgtgctcacaaaaatttgttttagccaggctttgggcccatgttttttattattagtttttaaacagcagactccacatcataaaccactttaaaatggatactagaggcctcctgtatgctatctctggcgcctgcttaaacagatgtttacagtgcttggtaacctatgggattgtcatgttgagtatcttgttagctcaggacataatgtttatagcataatataataaatggagccacagttgcagcgtgcttcttccaagtgcatgaagcaaatcttgcagcagggaaacaaatcttgcagttggtccaacttggctagccttctttggctatctcctggtgagcaatgttaatgtaaagataaatgtgagtgacgtagtgagaaagtgggacagtaaattgtttagcttagtgaaaaaagcatggattatgttttttaaatctgctaacctgaagattacacttctcaggtcgtaccactggcaaattgcacaactatgggaatttggtttgcttttaaagagcaatttttaaaaagtatgtcagtaatgaaaataacttatatttcttaatgtgtttatgtgtgtccatacaagccaatactttttcttctttaaaaagaaccctataatttctgtggtaattatttaaatattatgagcattcaaatctcctaatcaccttttcaatcttcaattgataagaatcgaagtttggtaagactggagtcatccctcagccaattgtgtaaacaagacagtacagaatgtctttctggcaagtaatttttttcaacctgaaacagataatataaataatatgtcccataaaagaattacttaagatgataattactttagaggtaattatctggtgcatgaacctctatctgtgaaaatggtctagtctatctcttattggaaataatcagttggaaatctccctttttcattggtcagtccattctaggaaagattcatttctagaaagttcttatactgaatcaacattttcttccatccacttgcctatccttcagcagctgaccacaatgaatctagtctcttttccctgtgtttaccatacttgaaaacaaatattatcctccttgccgaatccccttttgcctactcttggagcagtttttcatccactatagggttccaccctcctctgccttgaacaagatgcccttgattgtacattctcattgtattagtctgttctcatgctgctaataaagacatacgtgagactgtgtaatttataaagaaaaagaggtttaatggattcacagttccacatggctggggaggcctcacaatcatggcggaaggtgaaggaggagcaaaggcatgtcttacatgacagcaggcaagaaagcatgtgcaggggaactgccctttatagaaccatcagatctcattagacttattcactatcatgagaacaacatgggaaaaacccacttccatgatttaatcaactcctactgggtcccttccaccacatgtgggaattatgggaactacaattcaagatggcatttgggtggagacaaagccaaaccatatcattccgctcctagcccctcctaaatctcatgttctcacatttcaaaaccaatcataccttcccaacagtcccccaaagtcttaactcatttcagcattaactcaaaaatccacagtccaaagtctcacctgaaccaaggcaagtcccttccacctatgagcctgtaaaatcaaaagcaagttagttactttctagatacaatggaggtacaggcattgtgtaaatatgcccattccaaatgggagaaattggccaaaacagaggggctataggtgcaagtccaaagtctaatagggcagtcattaaaccttaaagttctgaaatgaactcctttgacttcatgtctcacatccaggctgttttcatggctggcattgactgtggcttttccaggcacatggtgctaactgtcagcccctaccattgggggtgctggggaatggtggccctcttctcttagctctactaggcagtgacccactggggactctgtgtagaggatccaaccccacatttcttttcctcattgccctagcaagggttgtttatgagggctctgcccctgcaggacaactctgcctggacatccaggcatttccatacatcctctgaaatctaggtggaagttcccaaacctcagttcttgtcttctgtgcacctgcaggaccaacaccacatggaagcttccaagacttggggctttcaccctttgcagccatggcctgagctgtaccttggccccttttagacatggctagaggggctgggacacagggtaccaagtacctaggctgcacctagcaggcccagaaaaccatttttccctcgtaggcctctgggcctgtgatgtgaggggctgccataaaggcctctgacatgttctggagacattttccctattgtcttggtgaccaacatttggcttctcattacttatgcaaatttctgcagcagtcttgaatttctccccagaaaatgggtttttcttttctatggcatcatcagcttgcacattttccaaacttttatgctcttttcacctcttgaatgctttgctgcttctaaatttcttctgccagataccctaaataatctctctcaagtttaaagttccacagatctctaggacaggggaaaaatgccaccagtctctttgctaaagcattaacaagagtcacctttgctccagttcccaacaagttcttcatcttcatctgagaccacatcagcctggactttattgtccatatcactataagcattttggtcaaagccattcaacaagtctctaggaagttccaaactttcccacatcttcctgttttctgagccctccaagtctctagaaagttccaaactttcccacattttcctgtcttcttttgagccctccatactgttcaaacctctgcctgttacccagttctaaagttgcttccacatttttgggtatctttacagcagcaccaactctaccattaccaacttactatattagcccattctcatgctgctaacaaagacatacccaagactgggtaatttataaagaaaattaggtttaatggtcgcacagttccacatggctgggaggcctctcaatcatggcagaaggtgaaggaggaataaggcactcttacatggtggcagacaataaggcatgtgcgggggaactaccctttataaaaccatcacatctcatgagacttaatcactatcgcaagaacagcatgggaaaaactcgccctcttggttcaatgacctcccactgggttcctcccatgacacatggggattatggtagctacaattcaagatgaaattggggtggggacacagcaaaaccatattactgactgtccctcctaatgtgtgttttctaaacaaaagatttataatttgtagttctgaacattctatatctattaagacagtttaatattaatgaaattctttagccatttcattacgctcttgattaatttcatacctataaacaagataacttgttcttttcagattattaatcatccatagtcaaagcatttttataatagcttcaaaacattttttcatgcctgaatgtactataaatttatggaaagtataatactgtgtgggtaaataaaattctataaacagtgcaaatagtgacttaatttctccctatcaaggaatatcaaccccaaatataccgaaagtagaatgttccaaagataaacaagttgaaactacatgttatagacaggtagggactatgatgtatttttttcataggcctcattgtgtctgcttccatgaacatgagtcagtactagcaatcaggcatttattgaaggcttgttctgccaaagtcccagagagtatgccatctggccttaaatgaagtgaaagtacatcaaataaagatacttccttgggcaactgggatttaagatgtgcatgcaggacatgtctaagtcagccatctactttttctcaggaggtaaatggcttgccaatgccacaggaaagtctaaagtgttcacactccataagcaggtcccatgtcctgttgtaggtctggacaggagctggacaaaggccctgttactcttagcttaccaagtcttagctgccttggaagaagatagcaaatctggcttatccagaggagaggcctgaagtgtgcattgggcacctacctggtgtgactgatttctcttttatgtatctgtcttgggcttccagctaaattgtgaattccccttgccaccaagctaagaatctgccacagcattgtcttcctgcacacacacacacatacacacacacaaaaacatatatgttggatgatgaagagacaatgtcagtttttcagcaagtctgaatgtgaaacaaatggctatgtttcttggtgcagtggggtgggaggatgagagagaaaaaacaaacctgtgatataaactgacatctgagcctaccaaaagccctttgagagacctttgatcaagacaaggggataatcatagtgttgtgcacttagataaaattgtccatgctagtcccgtgtgtgtgtgtgtgtgtgtgtgtgtgtgtatgtgtgtgtttcttcactttatccccagcattatggtctcaattcatacacatttgcttttttgctttattctagtctgatatgaagggaagaaataagcaatgattcagttcctttttttacatttcaaacattcatttcactactccccacctcccagtcctcaccccccaaaattacaagagacccattggcaagtacttggacatgcaattttcaaaccaaaggtttactttgctataagaaacgtctaagttaggatgatataatatgaaataatagtaaattagatgtcaagaaacttgggtcctctccaagctctgcctttaatgggctttgcagtttttgccaactatttaaccttcctgggcttcatatttcttgtatgttaaaaacaagcaaaaaggagaagtaaacaaaatgaccccttagaattctcttcagggctattgtttgaatccatttaattatcaaatttctctcttcttttaaatgtaagcatcaaaaaatgtttgcctattttattctctcatcattaatttttaatcaattaaataaaatagataaaaattttatcaaaaccatgcttcttgctttcattctaaaacaatgcaactcatcactatctgatgcagaaagtctttctgaaatattgtttttctcttttgttgttgtttttttctttgtgctaaagaaaattcattgatgagtaccaggttcttcaaagaaggatggaaaagtcattgttttttagtctcaacttctttcttcagtgcttcttcctaccttttaatataggcaaataaagccttaggccaggcactaattttacttagtaatgattcataagaaggtagtgattttgtcagaaattgctggctgcatgcttttaatcagcatctaaacttaccttcaaatactccattccaaaatcagcagataacttcttctacagagtctttcaaacttccagatgtgtttactgttttgattagggctttcttcttttgttgttgataagacttcagccagttttctttaggctaacattattatattcccaatgaattatacttcttaggttgtgaatttgtttaaagataaatctatctccagctggctggcttctaagtaaaaaggggtatcctagggaagaagtgcacttcacagggattcagtacaggtgtagagaattccctgatagagaattggaacacatcaagagtttgcaaattgaaaaggtacttttatgtacttatccatggtggacaacctgtgtcctagggaagaagcgcatttcacagggattcagcacaggtgtagagaattccctgatagggaactggaacacatcaagattttgcaatctgaacaggtacttttatgtacttatccatggttgacaacctactgtgctagacatttgctgtagtaactccttgattttttcctcggttgtttataaaattaaacatttgaagtagcctattgaaaagtcttaaaagaagcatctcctctattcctttagaatacagtatattaaacaagtgataaagtccaaagaaaaatccttattcttttcttgctttaaaaaatgcactttattttattaagcattatatctatcttttaaaactttgaattgccatatcaatgaaagtagagtgttatcattacaaaacagaatcgcagatagttctttccctgtgcttattgagagaaaaggtgcataattgatgctgtaaatgatcatcttgaatttgatgatggctggtgagaaacctcagtcagacattcaattttgattgccattggtcagaaaggcagcctttgttcttcgtcactatgtggcacatgatcctaattcaccctatcagctgcttctctgcacactttcaagctatgtgattgttatactagaaagcctctaagttggccaaactaatgaagactaatctgacaaagcatatgtgaatgataaattctgtaaagaccgtggagatagagcctctgcagtggcttcttcccctggggatagaagaagataccagaatccctgggcaagatgaaatagataaaggaaaggcatcatttttatacctaggaaatcagaaagattaaagaaagagaagcaagaataaagaagaactactactttcatagttcattctttcaatgtagcaccttatttcccatagagacattggtgaagccatgcttttctttgccatagaataggtgttcagtaaatattttgcaggtggccttaatatgtagtaaaacatacagaaatatggaagcattgacaagaagtttgtggataatttgagggcaaaaggatgtagataggatcaggttcataatgcaaatttgctattattctccttagattaatgatgtcactcaaacttcatgacctgctttccaaggtgtatgctgttcacagccttggaaacatttagaagtttttagtacttggagcaagatggatatatgtttcacattttatctaggacttagtaggacttgggagacatatctactttgccagatcttagtatacttattatggagcatgacattttaattctctttgcttttgtcctacaaagtttagtgttttaatttatttttctcggtgcatatagggagagaattatttatataatctgaaaagtactttgaaaactacttgggaaaatatgttgaataaataagtttttttttaaattagcctacaggatgtaagtctggccaggctagtggtatttttggtatcattgtgaaaaatcaaaaacagaacatgtatttatcaatccattagtgtgttcccaggaatgtgctagacactagggaattaaaacatgactcttgactttagtaccaagcattcaagctagaaggcaacactattaatgtacattcatggtgtgattatggaacagtcgatgactgtacaacttaatgaaaagttcattagagactataaatgctacatttatttagagagaaggacaatctgtttggactgagggattggaagagtggccttcatgggcaacatggctcctgagccagtacttaagatatggtattttttttttttttttttttttttggttaggtagaagggttggagaggtttcatgcaaggagttaggaactgaggaccaggaggcgtatcttgagttcactggggttactggtaatagggaggaggcagagagtaccaggctgtggatttgttatccgttggaagctcttcccattgcttattatggtcgctgcatataggctcatcccttgggtagggctattggagtggccaccctgaccctattgctgattggatagtggtggctgctgtgtggtatttcagcacatttatcttttctgaacattatgtaaattcagtctgaaaacttctttcttaaacaatgttccaagaggcctattaaagatgccaacaatatgacttccattcaagaatatgatcttgaatgggctttacaatggcagagctgacctgagattacctcctctgctcctgctctcaagccatgtgctgatgctgacagtcctggcccaatagagccatagggcctcacagaacttgagatcatctaccagtggctgtcaaccaagccactcctttctgctaggtagtgcatagggacattgggaaatacagttattataagaactggaaagagttgtaggcttttggtgcctgaagtcagaaatgctaaatttctgtgatgccaggggcagtcctatataagaaattattgtgcctcctcaaatgccagtagatccctattgaaatacttgagtctcatatcctcactttatttataggtgaggaaatgggaggccctgagaagtgacaaaactttcttctaggattaaacttcacagtctcagtgacagatttataactcaattcttttagttttctttcaagagctcttgttgcagcaccacagtccctcctattaacatgggctataactatggaatagcatgttgtttatctctgccatttttatagaaggatgatagttagctatgttaactatctgaatgggtggaatgtgaattgagataactggtacttgaccagcagttctttcgcctgggaacacacacagattcacctgtaaattagggttggcagatgcctgttgagatgtcaaccatagccaaagcttacaaattggttgactttttggaaagggcatggagtaggctttggattcacacaaatctgcttgtctgaccggatttgaatacaacccttcttatctttactatctttgtgactctcagccaattaaactctctgagctttatctgcaaaaaaacagttgattattcttatttcacaagcaatgagtcaaaatagtgcctggcacatattgggcactgcagatatagagaattccctacagtatctttttgagcataaagacttgaaaccttcacttataaaagaccctcttgataacagtcgctatttttttctcctcctttccccaaacaacgaaactagggcttcagtgagtccctgaagtgtttactttgtttgaactgttgagatttccctcctccagaagagtcctgctggccagagatgagttccttttgacttctctgtcaacgtgcctgtattattgtcacatagtaaaaatgaaagatatatctagatgattattagcaggttatgaaacttagattttaaagtcaataataaaagccattcctgggtagagaagtttttcagagagatttctaccttgccagcgatgagagagcctacttaggtgaggtgaatactttaggcaagttaagggataacacaatataatttatttaagtaagttttttatctgggactaatttcaggtttgcagaaaagttgcaaaaattttagaggtcctgtatattcctcacctagtttcccatgttgacatccataatcatgatatatttgtcaacactaagaaaccaatgttagtacagtactattaactaaaatccagacttcatcctaattcccccagagcttccactcacatcttcttttctgttccaggattcaatccagaagcgtgcactgcttttgattttatgatttttaaatactgtgcatgtgcttttttaatttgggccctctcatgtgttaaacttaccggcctttgtaaccagatagcaagttctgtaacagaaaatacaatgatgttgaatccaacatcatgctgggcacaaagtatgttctccaaactaattaaatttatcacagcaacaagaacaaagttttactcagcgtacatatgtagctgagtcctcattggtaagctaagaggtagtcataagagtgggataacttggaagaaatttgattttgaatgtgtgccctgaacattggtataaaacaggaccccctaaatcatatatgaactgagtctgtacactgtgcctagcattgtgtgtgcatatcacacttactcctgataactgtaaggcacatagccttgagtaacttagctgaggaaatgagaccaagggaagttaagttacttggccagggattcacagctagtaacacagctgagattaaaacatatgtttttctggcttcagagcctacactcctaatgctgtattcaattactcccacacttctccacttgcttaacccctattcttggtgtcctttttctaggtatacagaatttgaaaactatattgtcaaactacagcagacctggatgcatggtatacacttctttgtgagctggattaagtttcagccttgaatttgtggattattttcaaaacctgcctaacatctgtaaaacatgttgtttttttaatatgtagatatccacataaattgaccacaatgctcttcagaaagtcccataatccaataataaataaatttttgatacatggctaataacaggcacagaagcatctccaaaggacaggacattgatattgtgtaataatttaaagtattttatgattgtataatgtgcctgagttttggatagttgacctctatttctcagtctttacatagttactgcttttttaagtgttacatgagggatgtggaatattcagtgtaacatttgactaatctttatgttttgagtggcccaactgaaaattacccttggttgccttggaactctgggcatgatgttcaaaactagaaattcttgcaaattatttgagctttggctctgggaagataaacaacatgaataactaggttaaccagggctgaaatttctctaacctataattctaaattcagaaaagaatgggctttagggttttttgtttatttttgctttgattacaagttgttggaagcctagagttagtatctaataacacaatctatgtaaaacacaaattattggctcagaatgatatctaatttctaagaagatatgaggaggcaatcatgtaaaaacgtgcttttcttcctagaaggaataagctgggattggccaaaaggtaatccctttagagtctaatgtttagagcattgcatatttttaaagaagacatattaccttttagaacatatgtaggaaaccattttctttgcttatatggctacataaagttgtcatggttttaaaccgtgaccttagataccttatagaagtaattacaggcacaatctgtgaatgaagatttgcaaactatgcttcaccaagcctcagggactattggatgtccagaggacagagccatgttggatgtcttatgggccttcagtcctgcaaagtggtgtgctttcatgttttacacacagcagttctgagaaaatttaagttgaaaaaacagcctctcttcttattatttttatatttatttatttatttatttatttatttatttatttgaaacgaaatcttgctgtgtcaccaggctggagtgcagtggcgtgaacttggctcactgcaacctctgcctcccaggttcaagcgattctcttgcctctgcctcctgagtaggtgggactacaggtgcaggccaccacgcccagctaatttttgtatatatgtatttttaatagagacagggtttagccaggttgcccaggctgatcttgaactcctgagctcaagtgatcagcccacctcagcctctccaagtgctgggattacaggtgtgaggcaccgtgccgagccatcctgtcttctgaaaaaaaaaaaaaagcaaacaaaaatgtttaagcctggtatatattttcttatattgcataagctacttttctgactgcctctctttagaaattcctctgatttctagagaaaaaaaaatcgcattagctttttggtttctaaattcaggctcactttagtaactgctagattataaactcttagaaggcaaagggctatgtattctctacttgtggacactcaattagtttgcttaagcaattacttctgtgtaagcaacattaatgaagtgcttactatgatcaagggctataccaagtccttttttatattatttaatcccacacaaaacccatgatcgacctaattgtacacttggtgaaactatgatgtagggaggttaaataatttgttcaagaacccacagctggtaagtcgcacagtgtattcaaacccagatcttcctaattgcaaatgtgtccaactcccatgcttctaaccactgcctatgtgatggttctttgaaattcctccctccaagaagtggaatttaattccccccgtccattgaatgtgggccaaactcaggtgactcatttctattaaatggagtaaagtggaagtgaagatgtgtggctttagcgactaggtcattcaaagtggctcctgtcttggttgttctgtctcttatacctattgggcatttaatctggggaaaaccagctgccatgttttgagctgctctgtggaaaggctaacatgaaaagatactgtggatcctacagacagcttcaaatgaggacctgaggccctcagaccagtagccagtatgaaactgaagcctcttgaccacagcctccatgagagtaatggaatcttgaccccctagtgaaccacagcctccatgagagtaaaattcaagatggagccttgacacccagtggagcctcgagatgactgcagtcttccaccaacagcttgattcatgaaagaccatcagccagagccacccagctaaggtgattctaggcccctactcctagaaaataaatatttgctgttttgactgccaagtgtttgattaatttgttacgcagcaatagataaataatgcagcctaacactgtcctggtcatttttaaaaaagaaattgttttaattttactaaatcacaaattttaaaacattgatacagcaaggagaaactttccagaaaaaaaatgctgccaaatttaagtagtaaaatattaatgtccaaaaaacatcatagttacaatgacatctctaggattgaggattttgtaagtcaaaggtcagctgcttaaaaaacccataattttaaaaggaaggatattaataataactgcattattgaacatagatagcattttgaacttttaagaaatcctcatgggaaaactcaggaaataatctgtttggtaagttatcactcataatcttaaattgttaggtgcatgtttgcactttccatgatttgaagaggaatataaagcaaagttgaattttaacctcttccctaatgattttactcagcttttcaaaggggtcctaaaagctcagaggtcaagtcatttcttggtttgctctacctgacaaattgcattaactctgctttatagccacttgcagtttaataaatgacttggactttgattaatatctttagtgcttaagcccaagaatttgtataagactttgggatatagtactgtaaatttatctaaagatggacactggaaggtagaaggagatatattagtgttggtttgggtacatgtctaggtactgaatttggatcatcataagtccttacagaagatacttgttgacttgtcttttaaaaaatatgtgaaagtgattttttaatatatttacaaagtgatctaagtgatttaaggaattcattcatgaagtggatatgactagttcttgtttagtattcagaatgactgtaaaatagaaatgctgattttccttgcccagattgtagaacacagatcaaaccctcctagtccttcccttaaatgttttttctccatacagcttatgccctgagttctcaaaacattttttatattgaactggactgtatagtatatgcctgaccctgattcatgggattatgctgcaagggaatataaagatgaatattgatagcctgagtgtgaaaattcatcattactctcatcctcattcattaattcatttgttcattaactcataaacacactaattgattcaacagatatttattgaacgtttacactttgcccagtggagcactggactaggtgctagcatagtataataagcaacccagaaatagcctctgccttgctgcatttcatagtctaggacggagaaaggcattaaccaagtataatttaaaattgttttaagtaatgtgaaataaacatatatgagaacttgactcaggttggtatatttgatggttagggaaagcttcaaaaatgggatatttgagatctaagtaagagggaaaagaaagagcataatgggtagagaaaaaataggatccaggaagatacttagtacttctgagaactaaaaacagtcaagtcagtgtagtcagagttcaaagaaggagaaagaacatgatccaagaagaagccagaaaagtaagcagggactacatcttacacgatgatgtaggctgtattttagtttttacttatcttaagagcaatagaaaaccattgaagggtttgaagcaggggagtgacataatcaggtctgcattttaaggaggtcacctgctctattatgaagcatgaatggaggaggatggaaagagatattcagggagctggtttatgagtctgttgtaggccagaggtattggtagcttggaccagggtgatgatgctgaagattgaaaggagttaatagatttataatatatttgtgaagtaaagttgactgtacttagtgctgacttagatagtactggtgagggatgtcatggtaaactccaaggtactgggcttcttcaactgagtggaaaacactagagggagaccaggtaaaggttgaaggaaagtgaggaacagtagttcagtttggggatattttgatttggaggcctttttaagacttcctcaaagagacacagtgcagtcttgagtcctggatcagaggagatacctcaatgtataaatttgtaagacaatggtttatacacactattaaagccactgaggtaagtgagatcatgtacagagtgaaaatgaagtgagagaagaaagcataagtctgagccatgagaactccaacatttaaaggccaagtggaaaagttgacaagagtgggaattgtgactggggtagatgctagaggggcatctcagaggccaaggaaagagaatcatttaaggtgctgatgaggggtaaagtaagaaggtcctgtaaatgtcctcttggattaataaatttgatgttttgaaggactttagggagaatgagtttgttgtagtgatgggggcagaagccagaatgaagtgtcatgggaaatgggtggaagtcttgaaagagagacaatgaatatagataactcaagatatgtggtcaagggaaacaaaaaggataaggctttaactagaggaggaaatggagttaaaggaggagtttttttttttttgagacggagtctcgccatgtcgcccaggctggagtgcagtggcacgatcttggctcactgcaagctccgcctcctgggttcacgccattctcctgcctcagcctcctgagtagctgggactacaggtgccctccaccacgcccagctaattttttatatttttagtagagacggggtttcaccgtgttagccaggatggtctcgatctcctgacctcatgattcgcctgccttggcctcccaaagtgctgggattacaggtgtgagccaccactcccagccaggaggagtattttttaaagatgggagacttgagcacatttgaacaataatggggaagaccagtggggaggatcaggggtggcctgaagatagacagagggtggataaataatcatgtaggattcctgagaagatagaagaagttggatccagagcacagcagggggaattagctggccttggagaggagagatgatctctatcctctattctagaaggaagccaaaggtgatgtgtgcagatgcagaggtgtgtttgatgtggtgaagccaagtcaaaggagtttttgttcgatgccttatatctgctccagaaagcagttgagtcaccaactgagacagggagagagaaaggggctggcatactaggaaggaaaggggatcatttcagatatttgaggaggacagagtaagttggaatatgaaagggaataaatgagtgaaatttagtaggactgctagtcactgcttgaaggctcagctgaggctgatgatcatgaattcatggtactactgttagaattattataaaatatatgagcctttttggaggtgctcagcagtttaccagacacagaaaaacaggttcatctaggcttaggattttgtcagagaggtatgatgaaaagattgcaaaggagtttaggatattggcatgggcaagggagcttctggagtgataaaccaggaatctaagcctgctagggagggacatatagacaggagaaggagagtatagagatctttctgaaggttagaggaaatttgtaatcaaagtggttgattaaacaagacagaagtatagcagtcagtgatcagcccaggatgctgcaccccagatcaattaaatctgtatttctgggtgtagggcccatcccagtttctcaggagattccagtgctttccttaagggagaatattgatataactgttattaagactattgtgaaaaaacatattagcaatgtgaaatcaagacaaaaacacaaacacagaaagaagttagacaaaaacaaaaaacactgaaattacacattttctttttcacaaatcaaagtcaaattcacggaccttcttccctgactcattctccctgacattagaagtccaaagggagcaagtaaagtctttatggggaagatggtataattaagcaccaattacctagggaccagatgctttgggatttgactgatgaaaacagattagaagcatggtgaatttgttcactactgtctttttggaggggcaacactcctggctcacttggcatgaggtaatgtcagtctggctacaaagatttgaatgtggggcttgagtttctaaaaggggactgattggacttctcttagccaggatacttggacttggtggctatatcatggctcacagtgtcttggaatggtcttgagcctagttgaaatttgttgaaattacatatgaatattcattaatgtattacttggaactcagtgagaaggatcatcactgccagatttcctagttaggaaaacttaccttcattccttccagttaaatagaagaccattgtatagttcattttgggctaagtggagtgtttatgaaatgtgtagggcttataggcataactattgctaaagaaagcccagtaaagcttgacatcccctctgttgcccttgtctgtcattccataaatttaatgtcaagggcatttttagagaagatgatcacaggatgattcaggtagacatggagcaggttgtgaaaacactggcatgtttcaccaatgtattagggtttccagagaaacaggaccagtagggtgtgtgtgtgtgtgtgtgtagatttattttaagagattggctcacacaattatggagactcgcaagttcaaaatgtgcaaagtgggctagtaggttggagacccagagaagagctcatgttgcaagtcaagtccaagtccgctgcagaatttccctttgcttgggaggtcagtctttggctctattaaggcattcaactgattggagggcagtttactttactcagagtacatcatttaaaattttaatatcatctaagaacactctcatagaaacatttagggtaatgtttgacaacatatctgggcaccatggcccagccaaggtgatatagatatagatatagatagatatagatatagatatagatatagatatagacatagacatagatagatatagatatagatatagataatggatatatataatggatatataatggttatataattaaacattacacctgggaagttacagcactatcttctctggattaaacaacaacaacaaaaatactcagtccaattcatgatttgttgagggtctgtgtagaatatagaaattatactacaagtttggttttctttaggatggtgagcattttataaaatatgtatatataaagagaggcattctcttgtaacacttagaatagtcctgtacacatagaaggcacacagaatgtccagtgccagtgacatgagacttcataatgagtttgaagccaaagctttgtgtagtaaaaagccatgagcagttaataaatttccatttgatggcagctataaatattaaccagaagactcataactgtgttttcaactcacatacctgggttggggcagaagcaatagtttcagcagcttttatttatctgcttttaattccatctcaccattgttaaatttacctgaaataattgccattttgacaatgccctcaaaaatcatcttattgcctggggactgattttcagattcctgagcccagtattcagaatcctatatattccctcaacctatctttccatgtgtattttctgttgagcttcaaactgaactacctctttgctctcaacatattctatttgttaacttttgttcatgttattccctctaaaatgacttttctctaatttttttcattctctcattcttcttgtctttcgaggtggaactcaaatgccacaacgtcaaatgccacagtatctgctatgatccttcccctttccagctacaaattcctctttcctctaccacttctttggcacatttattaagactcgcgatttctctcatctaagtctcttgtgcaatgtcttactgtatgtggcctgaattcaggatctatgtctacagcctcccctttagcctcactccagtatcttgcaggtgggcagtcctctgtaaacacttgttaaaaaagtcaaaacacatttttcaaatcagaaagaacctaacatacaaagcctcattgtcatttttaaatttcatcgaagagctatacattgaattttttgtgtgttctctatagtacctagccatgtgctggacagtggacccacagtggacattcagtaattagtaatagatggatttattctgtatttaacaaaattttctggatgcttttagactgaaggagattggtttgatgacacaagtttcaaaagacaatgttattgctaatgcacattatgagggaactatgatatattttgaagtccaacaaatagaaaaatgaatcaatcacgagtcagatttattgatggaattgtgccaccatcaagtcctaaagcattagtagtgatgttatcagaaaatatcccactctgagatcatctgtagccagctttatactctaaaagaatagtctgagtatgttctgcctggaaaagggctcagtggtctaggaattattgtttttactttttcaaagtttataaacttggcatgactgtgcttttctgtggcttccaatctctggtgataagttttctcaaaatattcctgatttatcctgatgtaaatcacaattcataaatatcaagagagactgcctacagtaccatcttctgatttaaaaacacatttgaatcaatatttacttatatataatgcattctgctgaataaggaagttctgacttgttaagctcagtatgcttcgataagaaagcaaaatttttttgttgggtttttaaaatgtattttaaggtccttgtctcttggtgatagttctttacatattgaagtgccagggaataactgtccagtagctggacaagagagactcataatatggcagttgaagccaaagcattaagcaaaaacagttattaatattaacaggctcactgtagagagaagccatagttgtcaggggaggcagaactgcccaggaaacccatctttgtccttttgtctacacaggttggggcaaaagcagcagttatttgaactcagcaaacctgtgttccatattgaaggcctgcataagtcagggaccagggatgtaatgaagaccagacatggactttaggagcacaaagtgtagagataaaactgcactcataatgtaagctaatgggaggcaggaacgatggaagcagcaaagactcgctacagtgggaggagttatgagagacttcccagaagatatggcatctgagctgattcttaaaagttctgtaagaggccaacaggcagagaaaaaatgaaaaaatgctattaaacagtatagcccataaccgtggggatataccagaggatgatgtgttagggaaatggtaagtactttaaagtggctagatcagagaatgttcgagggcaggtgaagggaaaagtaggcagggttcttatatttatatcagtgatcttggactttgtctggggacctgcaggtagctgctaccagaatttcttatgtcagtaagtaacatgatcagatttgttattttagcaagacaacttacactataaagtatagagaggtgtttggagtgcactgattgaacagtagtgtggagatgtgttttttaataataaaccaaatgagtaataacatgtcttactcttacataattagtaagatcttgccagcatctttgttggatgaaaggaagcctagtgtttatcaccaaatcttttgagatgtcagtataacacaacactgtattccacttttgaaaacagccatccctatagtgtgtgaagagaatacttaaagtgcagacagacaagtgaacaccgcacttctttgtcacatgcagtcaagaaaccagacaagatatttaagctatgattattagtgttggcaagggttcagctccagggaaaataaatacattgagttagtggtggtgatgagattgacacgaatagagttgtattttccttttcatgctgttgcaagggaaatgaagctttaaacataatgaaattggttcttgtgaacagcaaatctgctatttcttcactttttatggctttgtcaacagtgatctaagttttgctttacttatttattttaaattttgttttattttaatagtttttggggaagaggtggtttttggttccacgaataagttctttagcggtgatgtctaagattgtggtgcacccatcacccaagcagtatacactgtacccagtgtgtagtcttttatccttcaccccctcccacccttctccctgagttgccaaagtctattatattattcttatgactttgcatcctcagagcttagttcccacttacaagtgagaacatacaatatttggttttccattcctgagttactttcagctccatccgggttgctgcaaatgccattattttgttcgtttttatggctgagtagtattccatggtatatatatatcacattttctttatccactcattggttgataggcatttaggcttgttccatatttttgcaatggcaaactgtgctgctgtacaaatgcatgtgcaagttgtgcaactgcctccctccctccatctctctctctttcctttcttccttccttccttcttttcttctttccttgttttctccctccctccctccctccctctatctctccctccctccctccctctctctctctttctttctttcctttctttctttcttttctttctctctctctctttctttcctctttctctagccctgccacccaggctggagtgtggtgccatgatctcagctcactgcaacgtccaacctctgcctcccaggttcaagcaattctcctgtctcagcctctgggattacaggtgcccacaaccatgcctagctactttttctatctttagtagagatggggtttcatcatgttggcctggctggtctcaaactcctgacctccagtgatccacccacctcagtctcccaaagtgttgggattacaagcatgagtcaccatgccccgcacaagtgtctttttcatataatgacttcttttccttcgagtagatacccagtagtgggattgctgaatcgaatggtatttctacttttagttctttaaggaatctccctactgttttccatagcggctgtactagtttacattcccaccagtagcgtaaaagggttcccttttcactaccttcatgccaacatctattatttttttattttttaataatggccattcttgcaggtgtaaggtgatatcacattgtggttttaatttgcattttcctgataattagtgatgtcaagcatttttttccatgtttgttgggcattcgtatatcttcttttgagaattgtctattcatgtcctttgcccactttttgatgggattatttgtttttttcttgctaatttgtttgagttccttgtagattctggatatcttgccgattctggatattagtactttgtcagatgcatagtttgcgaagattttctcccaatcggtgggttatctgtttactattattattattattattattattattattattattattgctgtgcagaagctttttaattaattaggtccaatttgtttatttttatttttgttgcatttgctttggggtttttgctcatgagttctttgcctaagccaatgttgagaagagtttttttgatgttatcttctagaattttaatgatttcaggttctagatttacatctttggtccatcctgaattgatttttatataaggtgagggatgaggatccagtttcatccttctacatggggcttgccaattatcccagcaccatttgttgactagggtgtcctttccccacttcatgtttttgtttgctttgttgaagatcagttggctgtaagcatttgcctttatttctgggttctctattctgttccattggcctatgtgactatttttataccagtgccatgctgttttggtgaatatggccttatagtgtagtttgaaatcaggtagtgtgatgcctccagatttgttctttttgcttagtcttgttttggctatgtgggctcttttttggttccatataaattttatgatttttgttccagttctgtgaagaatgatgatggtattttgatgggaattgcattaaatttgtagattgcttttggcagtatgttcattttcacaatattgattctacccatccacaagtgtgggatgtgtttccatttgtttgtgtcatctattatttctttcagcaatattttgtagttttccttgtagagatctttcaactccttcgttaagtatattcctaagtattttatttttatttttgcagctgttgtaaaaggaattgagttcttgatttgactctcagcttggtcattgttggtgtatagcaatgctactgatttgtgtacattgatttttgatcctgaaactttactgaattcatttatcagatctaggagctttttggaggagtctttaggattttctaggtatacaatcatgtcattggtgaacagtgacagttggacttcctcttttctgatttggatgcctttatttctttctcttgtctaatcactctggctaggacttctagaactacgctgaatagaagtggtgacagtgggcatgcttgtcttgttccagttctcaggcagaatgctttcaacttttccctattcagtacaatgtgggtttctcctagatggtttttattactttgagttatgtcccttctatgccaattttgttgagggtttttatcataaaagtatgctggattttgtcaaatgctttttctgtgtctagtgagatgatcatatgatttttgtttttaattctgtttatgtggtgtatcacatttattgactcgggtatggtaaacctacatccctggtatgaaaccactatatccctagtatgaaacccgcttgatcatgatgtgttatcttttttgaaatgctgctggattcagttagctactactttgttgaggatttttgcatgtatgttcattagggatatttgtacttttagttttctgttatgtcctttccaagtttaggtattagggtgatactggcttcatagaatgatttcctctttttctatctttttgaatagtttcagtatccaattcttctttaaatgtcagatagaattcagctgtgaatccatcgctcttggactttttttgttggcacttgtttttttattactgtttcagtctcactacttgttattggtctgtccagagttcctgtttcttcctgatttaatgtaggagggttgtatatttgcaggaatttgtccatctcctctagattttctagtttgtgtgcatataggtgtttataatagccttgaatgatcttttgtatttctgtgatatcggttgcaatatctcgtttcatttcttattgagcgtattcggatcttctctcttcttggttaatttcactaatggtttttcaatcaattttatttatattttcaaagaaccagctttttgtttcacttgtcttttgcatttttgttgttgttgttgttgtttcagtttcatttagttcttctcttatttggttatatcttttcttctgctttgtttgggtttgtttttttcttgtttccctagttccttgaggtgtgaccttagattgtctatttgtgctctttcagactttttgatttaggcatttaaaactatgaaatttcctcttagcatcacttttgttgtatcccataggttttgataagttttgtcatcattatcattttgaaagaatttttaattttcatcttgatttcattgttgacccaaagatcattcaagagcagattatttaatgtccatgtatttctatagttttgaaggtttcttttggagttaattttcatttttattccgcagttgtctgagaggatacttaatatgattttgtttttcttaaatttattgagactcgtttagtggcctatcatatggtctgtcttggagaatgttccatgtgctgatgaaaagaatgtatattctacatttttaggtagactgttctgtaagtacctattaagtcaatttgttccagggcatagtttaagcccattgtttctttgttgactttctgtcttgatgacatgtctagtgttgtcaatggagtactgaaatcccacactattattatgttactgtctatcttgtttcttaggtctagcagtaattgttttattaatttgggagctccactgttagatgcatatatatttatgattgtgatattttcctgttggactaatccttttatcattatataatgtccctctttgtctttttttttttccactgttgttgctttaaagtctgttttgtctgatataagaatagctactcctagactggccgcagtggctcacacctgtaatcccagcactttgggaggccaagatgggcagatcacaaggtcaggagttctactaaaaatacaaagaaattagccaggtgtggtggtgtgcgcctgcagtcccagctactcaagaggctgtggcaggagagtcacttgaacccaggaggtggaggtcatagtgagccaagattgcaccactgactccagcttgggcaacagagcaagactctgtcaaaaaaaaaaaaaaaaacctactcctgctcacttttagtttccatttgtgtgaaatatctttttccacttctttaccttaagtttatgtgagtccttatgtgttacgtgggtctcttgacaacagcggatacttggttgtcggatttctctccattctgtcattctgtatcttttaagtggagcatttaggccatttgctttcaatgttagtattgacatataaggtactgttctattcattatgttagctgttgcctaatactttttaaaattatgttattgctttataggccctgtgagatttatgctttaagaaggttctgtttgggtgtatttcaaggttttgtttcaagatttagaacacccttaagcagttcttgtagtgctgatttggtagtggcaaattccctcaacatttgttagtctgaaaaagactatctctccttcatatctgaagcttagttttgctggatgcaaaatttttgactgacaattattttgtttaagggggctaaagataggaccctgctcccttctgattggcaaggtttctcttgagaagtctgctgttaatctgataggtttttctttataggttacctgatgcttttgtctcacagctcttgattttttcctttgtcttgactttagataaactgatgactgagtgtctaggtgattatctttgcaatgaattttccaggagttctttgagcttcctgtatttggatatctaggtctccagcaaggccagggaagttttccttaattattcccttaaataagtttttctaatttttagatttcacttcttcctcaggaacaccatttattcttaggtttgactgtttaatatagtcccaaatttcgtggaaactttgttcatttttaaaaattcttttttctttgtctgattgggttaattcaaaagtcttatctttgagctctgaagttctttcttcttcttgttctagtttgttgctgaaactttccactgaattttatatttccctaagtgtatctttcatttccagaagttgtggatgtttttctttatgatatctatttctctggagaaaatttcgttcatattttgtactagtttttaaatttatttaaattgttttttgcctttttctggtaactccttgagtagcttaataattgaccttctgaattctttgtctggaaattcagagatttcttcctggttcggatccattgttgtggaactacagtaatctttgggggttttatagaactctgttttgtgatattaccagaattacttttctggttccttctcatttgggtagactattacttaaaattgtttttgtggactgtgttttttttttaatttcttattttttctttcttaagaatcagactctaatgtttattttagcctaattggagtcttggtgcttgtaggggtgaagactctgtacgagatccttagttacagaatcttcctgcactggttttccccaatgctgattttagtagttacatacttggtgtgtgggtgaattctctgtctcctgtgaagctggaatggcagggatcccttgacgcttatgtcctcctctcatggtatacagtttatttactggtcttttatttactgagttgatgattcaggcttcaggacaattggggaggtatcccccggcaggcaccagttgtggctaaggcaagtgggtagatgtaatacccaatggcgagccgaggtcacagccttgatgagggtggctggaggagctctcaattaggtgtgctgaaattttatcaaggtgaaaagtgggagcttcctcagctcccctgccaagtcagaaagaaaactattcacctcacagcctcactcctgtcctagcatttcagctattcagatcagacaggcatctcttttcatctataggaatgttgttgttccaagtagggaggaactgtgactctgcctctcatgcaggcctgaatctggggtttgctcctcttgtgggcgatactcaccctggagtgttccagaaaggctgtctacaggtgtatccatgtgtgttcctgtgggggaagccccagctgtgtctgcagtggagtgccagggggaacaaggactccttttccaaggcccttcatggtcacagaggctgcttgcctattggggtataggtgcagactttccctactgcacctggcactgcaattgggtctctgctgtgagaaactacccactagcagaaagatctgaaactcctactattcagattattttgtctcacttagtgattccttgatgtggtgttctcctctttcccctagggatgggcttcctgagagccagattgcagtgactgttattgttcttctgggtctagccacccaatggagttaccaggctctgggctggtgctggcgaatgtctgcaaagagaccggtgatctgatcagtcttcaggtctcctagccatgtataccagcacctgctctggtggaggtgacaggatagggatgtagactctgtgagaatccctgattgtagataggtgtagtgtgctggctttctcaaatgctagttatgctagtattgaagttgccacgtggacagactaaggacctctggttagccaggatgttgcaggcagtgatattagctgttgttttctccttcctgggagcaatattattgtcatgagtatggcctgagttggttggcctccagccaggaggtggtgtcttttgtgttcggctgccaaggcagatagaaaaataccatcaagtgggggcaggattaggcgggtctgagctgagactcttcttgggctagtcttgccacagccactatgtaggatggggaggatggttttcaggctgatggggttatgttccagaggggattatggctgcctctgtggcacagaatagttcaccagggaagtggagaatagccagtagtgaaaggcttcacccagctcccacacagttggtgagcccaatctcactcttgcaatgctgtgttaacagcaccaagtttagatccacgcctcctgcttgtggaactcagtcttactccaggccatacacttccccactgagaaagcaagcaaggctttcaggccacacccctccctgtctgcccacaaggttcctgtgctcatatctgctgcagttcccattcacccaccagattctgttcacgcaggttcatgccccctcaaaattatcacaaaattcatttggaagcttctttcaccttgtgccccctccctaattctgctggctgccttccctgagggcccctgtgagatatagtcaggcatggcttccctgggtttgagctggagactgggagtgcctacaagactcttcctgctgctgcttctacttttgtgtttcacgtggctccctaaatctgttccagctctaggtaaggttaaatccttctctcatgatctggattttcagattccccagtgaggatatgtgtttggaggcaggttttcccccattcacactttgggaactcattgctttttgcctgtctcacagagtttgcagcagcctgtcacttctttcaaaggatctgtgaattctttccattttcctgatatgatcctgtggtggttcttggaaaaaaggttcacagtctgagtctccacacactgttctgtccatccaagcaggagatgtatgttagccctgcctgctatctgccatctttcttctgtccccaatccttctctttagatagctgagataccatcttttgtttcttctgacttggttctattcactgacattcctctctatcaagtagatttttgaactttcatggaaatttattcccaatttatatggaaataattcccaatttatatgaaaagcttataaagtgattcattaaccaagtatttactgaggtgctaaaagtatactctgaagcaggagtggcaagtcctttgccttcatggagattgcattctcttgtaaatcttacatgatggtcactagatttaggaataaaggactccagcataaaacactgacacttctgctggagaaatattttacaaactatatatattgaagcccaaactctggtttattggtaaaggagtagcactgatactagaattttgtgatcaacatgttggaataagaagtcagaagacttagatctgtgttctttttctcccgctggctataggttgctttaatctctgagctgcagtttcctcatctacagaataggttagaccagattagtggtcttcaactttggctgtatattagaattatcttactcttgaccaattaggttagaaatttcgggccacacacaatggcttacgcctgtaatcccagcattttgggaggcagatacgggcagatcacaaggtcaagagatggagaacatcctggccaagatggtgaaaccccatctctactaaaaatacaaaaattagctgggtgtggtggtacacacctgtagtcccagctactcaggaggctgaggcaggagaatcgcttgaacctgggaggcggaggtggcagtgagccgagatcgtgccactgcactgcagcctggtgacagagcgagactccgtctcaaaataaataaataaataaaaattaaaattagaaatttcctggtggagaggaaagcagaggtatttttaaagctctcaggtgatatatttctgttttaaggtaggactaaaaatcatgggactacgtcagaagttctaattataaatctataggttagttttctccaggcatgggtatagtgcttaaatgccttttaaatttgttaccaacatagaaaaaaaaaggtttccggcttctcttgaaaaatggaaatattaggcaacagttgggcttatgtttctgagtggtaaaaattaaacaaagtaaacgagtctccgtttcatttgttcctgttgccttcctggctcttgaaggcattgtcatttgtgaaaactaaactagatggtctttaaaatctccaattatttgaattgcttatttccacatccagaaaagagacggtaaacaaactatacctttatctgtaagctagttggtttgtgaaatcaaagggaacttaatctttgaatatggaaaaatcccagggtccaatggaagagaaactccatctcattaatagcaggactccacagactgctatggaaaagacacccacccggggctaagagggagggaggcggaagaggacttaattcattttctgggcatttttaatgaagctttcccctctttcattatttcttatttgggagctggatcattagttgggatgtgactggctttccctggggagcaaaaaggagattaacagaggttttgctcgcttcttcctgtgatttactgtgggaagtctcccaggttcttcccttcgcttctctgtggccttcatcttcatggtttcttgctgtgtctctctgagagcaagtacctgggtgaaaaaggctgagtgtgtggttttttggcaactgcctggcattggatttaagtgggtatatttgaattactagaattttacattttataggttcaaaatatgcacttgaattctgtaggacctcttacccaaattgaataatcctttgtgccttgttaaattttaaaaagtcacactatcaacattatgacatatggcatatatgatggcaataataaaaataacacacttattgtccactttaatgtgccagcagtgttccaagtgatttgcgtaaatatcaaatttgttccacacaattatcctatgaactaaatgttattatttcctggtttataggtgaggaacacagaggctcaaagcagctatttgatttctcttatttcaaaattaggggaagtgagatacattaacctgtataaccagaccttgttaactgtttttggtaaattccaatgtgtattgattttcacaaagacaaatcacaccattgttatattaaatattaattttttcatagtccctcaaggtgcttactggctatattgttactgtcttttgatgttgtttatacatggtggattacagaattccatgaacataaaaaatcttgactttatcctagcctatttcctattcttaccccctgcaaagtaaaaagttcaaaatagcgttagtaagccaagcaaactacttactagccacatgaacctactagcctctctgcctcagtttctttgttgggaaaatggacaatacctaactcaactcataaggatatttctagaatcaggtgtaatatcaaataaaaatatatttcctttttcctagaagatacccatgtatatcttaggtactgatgtattcatagtgatgcagaacataaaatgtttattcttttgcttagcaacaactatccatagagatttttccactttagagatttaatcccattaaaggtttttagattgattggacaatgagaatgtttttgtctctctgaaactgaggctgaaagttgatttcattctctcacttcaaatcatactacaaggctacagtaaccaaaacagcatgtcactggcacaaaaacagacacatagacaaatggaacagattagagagcccagaaataatgccacacacctacaacaatctgatctttgataaagttgacaaaaacaagaaatggggaaaggactctctattcaataaatggggctgggaagctagctagccatatgcagaagattgaagctggacccctccttacaccatataaaaaaatcaacttgagatagattaaaaacttaaatgtaaaacctaaaactataaaaaaccctggaagataacctaggaaatggcattctcgacataggacctggcaaagattccatgacaaagatgtcatgacaaagatgtcaaaagcaattgcaacaaaagcaaaaattgagaaatggaaacagattaaactaaagagcttctgcacagcaaaagaactatcaacagagtaaacagcctacaggatgggagaaaatatttgcaaactatacatccgacaaaagtctggtattcagaatctataacaaacttgaacaaatcaacaagcaaaaaacaacccaattaaaaagtgagcaaaggacattaacagacatttttcaaaggaagacatacatgtggccaacaagcatatgaaaaaatgctcaatatcactaatcattatggaaatgcaaatcaaaaccacaatgagataccatctcacaagtcagaatggctattaccaaaaagtaaaagaaaaacagatgcctgtgaggttgtagagaaaagggaatgcttatacactgaaaagggaatgcttatacactgctggtgggaatgtaaattagttcagcaattgtggtaagcagtttggtaatttctcaaagaactcaaagtagaattaccattagacccaataatcccattattggatataaacccaaaggaatataaatcgttttaccataaagacacatgcatatgtattttcactgtggcactataacagagacacaataacaaagacatggaaccaaactaaatgtccttcaatagtagactggataaagaaaatgtgatacatatataccatggaataccatgcagccataaaaagaaatgagatcatgtcctttgcagcaacatggatgaagctggaggccattatcctaagtggactaacacaggaacagaaaaccaaataccacatgttctcatttataagtggaagctaaacattgggtacatatgaacacaaagaagagagcaacagacagtggggcctacttgtgggtagagggagggaagaggatgaggattaacaaactacctatcagatactatgcttattacctgagtggcaaaataatctgtacaccaaacccctctgacatgccatttacctatgtaacaaacctgcatagtacccccgaacttaaaagttaaaagaaaaaaaaatgattaatgagcgtgataccagaacaatattatgatgcagggctattttttgtgtgtttgctagctgggcttgagatttgataaataagtcccattgtcctaatccgctagtgatgatgttctagcctttgaaattcaaactactactactccactttgagagagactgcatgagaattggacccagcctggggctttagacaccatggttcaaatcttggctcttatcattttttagccacgtgtcatggactcaatgtttttgtctcccagctccccagattcacaggttgaagccctaacctccaatgtggctgaatttgagattagggcctgtgaggagctggtaaaagttaaatgaattcttaaggataggtctccaatcctatagagttggtgctcttacaagaagaggaacagacacccgagttctctctctttgctatatgaggacatggtgaggagtggccatctgcaagctcagaagagagccctcaccaggaacttaagtgtctggcaccttgatcgtggacttcccgacctccagaactgtgagaaataattttttgttgtttaaatcacccaaactgtagtattttgttgtggcagcccaagccaattattataccatgtaagcaggttacttaaatttactaaatatgtaagttacttaaaatttcaaatcctggttctaactttactagctatcacttttactagctaacacattacattttcttcaacttgccgcatgcttttgctgtgagttttaaatgaaattgcttaagtactttgcttatcatactgctgatccatagtaagcacttaaagttagtttccaggaagtttggaatggatctcacttatgcaaatggttgactttgacggtgcttgttcctctctggaaagggttcacctcccattagaatagtcctgtgactgcagtaattttgtatgttaaacttacatgtatatctgcagaatgttaaatctgcaaacaccatccatcaacccaaaagcaaaaaaagagtgtttcctaatagttaatagttggtagcttaataggaaatctagaaaaaaaatgtttaataatgaaggctatattaataccaagtctcatttgagttcctgtcagtaaggaaatagttatctttcgttgttaatcaatgaagaccagttgccataattagggctctggtgtgttttcttcacatggtcttctaggacctaatgtaatatcatttgagaggctcaaagaggatcccatattcccaaaggtatcttagagtccttagctgcccaacatcccaccattaatcatgctttgcagatgaaaaattgaagactccttgtctctgaatatctgggatatgctttcattcctaggatggacatttttcttcttccccaataaggaagaaaaagggacagaggtgatttataagagcagttctactgagtgaaatgtgggtcctagcaaaggaggacacagctgccccttgtaatagtggagggaaggaaggaggcaggctggctgtactttgccctcctcaaccctaaaccctatctgtttaccacagtggaccttttttctgaactctaacctcattatttcattcattatccacgtaatattcattaatgttctccaaggctcttagaataaatctttaacatttccccaaaaagtcacaaggtctgacacctgccttcctttttccagcttcctatcataatcctcctttttggcagtggccacactgatcttctttcaggttcccaagctcagcatttgcttttcattgggagccccttacatcatgactgtcagcctgattgtcatttctttggggaggccttccctgaaccctggaactggatcatatacccctatcatgtgctttcatagcaccatgaatgtctccttggtggcagtccccagtaggagaattctgtgtttatctgtatggctgtttcataaatgtttatcttcctcccaatagtctgtcagcactttggcagccagttgtgttttgctgttgattctacctccagcacagaatgtctcttagtatttatggaaggggacatgaaaaaagaaaaagtccactgcatgaagatttaatccagcgacactgaggcctgaacatctagctttagggaagccagcttctagcaggacagactggtagggactaggtaaggagaatggaaaaacacagggaatgagcatcactttctttaagactttgcctctggcagacccctccaagtaacagattccaaagagattgtgaatgttctccctctggtatgcagtctcctgtcctgtcagaaacatggtacccagaggccaaagctgctgcataagcaagttatcatgaaactattccaggacaggtttcagaagcagggtcttaaaaatgagtattaaatctaatgttcacccagatacatttccaacccacatatagacaccgaatttaacgatgaaagtggaagttactctgttgaggatttatttgaaatgttggttttctcttgtccatctgatacaggtcatagctctgtttctgtcattagattgattttcatgtttctcagcacagactctctgtgagtcagagataagtttaatttttcagcatggccataggaatgatgaagtcattcctcattaaaatgaagctaagcaaaatttaatagtacttgtttaagattccttatttacttttctacacaaaaagagttgcaaggggaaaacaaaaactttagctttgagtaatttccttaattcaaatatagatttaaaccactttgtcataatatgtaaatgaactattgcttttttcaccacaggtctgttttcaaatagataatgagattatataaataattaccttatataaacataaggttactcattattgaaagcaattttctttttttgtttctggtttattatggttaagagtgagcctttgttttagatatttgaaaacaaaatgtgtgtgtgcgtgtgcttttgtgtgtgtgtgtggatatgtgtatctagggaggtcctcaaattcaaaaattataatacaaggttgtaatgtcagcacttcctattgcatagttttataatggggatatatagctatgcattaaaatgcattattgaaatggaaaatcaggatgtgttaaaaatgaattagtaattatattaagatctgaatgggaactagcatacaatgtaacttaagcttttgaaaaataaaaaaaaacagaaaataattaatgataagttagtttcagtattacattgataaatatttccagaataagctataaaaaataaggaggtagatttattattttaaggttcatactaaaagattgtaatatttacttaacctttctttatttaatttagaataagattactgtcatctctctaagcatctatgtaatagtgttttatttacttttccattaaatattactgagataaataaggagtcctggtgaatgaaatataatttaataagcagagttttcttaggtgaaaactaatcatgtcctgctataaatgtatattgagagagaagctgaatagacaagctccatgatttagtcaatgatacgacttcagggaaaatgtttttatgccttgttggccatatcttttaatacttgcattgaaaataaaattacatcccaagattatgagggttgtgaaattttataattagatatttaagtcctgaattgattagcagcagtataaacatagacatggattttgggttaaatctgagaactatttttttgtactaaaatttgcgtgcagatgacaatgggaaaatcaaatgttttcctggaaaattttcaaatgggacaaatagtcatctttctggaaatatgaaataaagggagtggtagtggttggactataaacctctttgaaggccttttaatctttagctgtaattcatgttttatcaccattggattttcaaaacggaaaataccttagaaataatttagtgggccgggcgcggtggctcacgcctgtaatcccagcactttgggaggccgaggcgggtggatcacgaggtcaggagatcgagaccatcccggctaaaacggtgaaaccccgtctctactaaaaatacaaaaaattagccgggcgtagtggtgggcgcctgtagtcccagctacttgggaggctgaggcaggagaatggcgtgaacccgagaggcggagcttgcagtgagccgagatcccgccactgcactccagcctgggcgacagagcgagactccgtctcaaaaaaaaaaaaaaaaaaaaaaaagaaaaagaaataatttagtgttaccttgttgatattaccaaaaaaaaaaaaaaagtgctcagagtcacataacttgattcagtcagagctggtactagatgctcagtcttctgacttctaatttagtttgctttcattatctacttactacctgctgctgactcagagctcctcagctatctgcaagtggatgtgtttattgaacatttacgatgtacatgaactgctctcaatgcgaagctcccatggtgaatgggagcttactttctgactcaaaaattagttttctctctttgtgttctaaatgaaagtgtccttttgctttatctgaagcagaaagttgtaagtttgtttattttacttttgaaattttggagaattggcagtggggtcatgccatcagaaacacatacatgcaatgcatggatgcacggtgtgaatgagctctctggaagatggtagattatgggaaagaaggaagctcagaaagagagtggaccaagtcaagaggaaagagagaagaaacaggcaagtgtggagcagaggaaaagtaggagggtcatgaatccattctgcaggtgtgtgctgagtgactggaagaaggaaaagaaccaaggaagtctctgccatgttatcttagttttgttaagggtataaagagattgaagagagtttaactaggccatctttaaccctaggacatccctagagtccctggcagaactaataatctaaattatgaatggctgtgtgtgcacacacacaggatgcacttactaatgtctatcattatgagtatcttctgacttctccactacaaagaaaggaagggaatgtgaccctctttccaggttagaagtaactagggcatagtaacacaaatggatgaattaaactgtttaaatggtgcactggaatatatttattttggggcaaatcatgaagaaataaaaaaggaagagattctcttttgagaaaaagtttgtttcctattgtcaattgagcaactctgtgaacatcttaaagataaagaatgattattctgtaaagtgctgggatttctggtgctgtgtgacaaagtccggttccttttgtctaagttagttataataatctttaatgaaaagcagaggggtcccatggtttggaacaagtatctgagtcaagagttgacaagtagaatagctgggcgcagaggctgctgtcaagttgacaaagccagaacagtacatttggacagaaagaatttgattttcttatactgaatgtgatgatcttgaagaacagattttttttttgcatgaaaataaatctttattttcagttattacccaccagtaagagaaagttaggttaagggtataaagggattgaagaggtttctacttttgcccagtccttattttgaatagccttccactcatccaaagtcatctcttttggaccctcctcttttacctcttcaacttcattctccttattttcagtgtctgccactggatgatgttcttcaccttcaggtgtttcctcagtcacatttgattgatccaagtcactgcaattataagatatttgtttctgaatgtatttgggggactctgttaattcatctttgacaattccccagttgtgagatctgctacctccacgttacaggtcctcgtgcttcaggccactgtaatgtgaaaaaaaagatctatcacttccactatacctatcaaattcacgtttgccacgagaatcaaatccatctccttggcccatttcacgtccactgccctctcgacctcttccaagaccaccatgaccttgaataggtcggtcaataatcagtctatcaactgaaaattcgcctccttcacccctttcatcaagtggcttttcaagtcttcgttcacaaggtggtctcctttctggtcttctatcagttattttcccttcaccgtgaagttgttgagcaggtcttcttccaacttgtcttattccttcttctttttgtgttttttatttttcctctaggcaagctttattctttgattcctctatccaggaagggggctgttggttgcatcttacccaaatggaatgcaatgggaattgggagcttgagttgtgtggaggaggagttgtcaatcttaacaaatgactatagctggcgtgtggtgtccatcaatccttgagggcttggccatgcacactagggaatggtcagaacagactcaacagaggtctccagagctttacaatatctacaatatcaaggttcagggggtatagacagtaaggaaaaaggccatttcctgtttctgtccatttttggtacagtagacagttaaggttttttcttttgactagcttttaaaaaattacttagaaaatggaaagcttataaacattcataagtgaattgttgaattgctaccccaagtggtttccttacctagtcaccacttaaccagaaatactagaatacacggttcaaccagaattcaaccaggcagataacctgcctattgctcaagcaatcatcagagtttttaaaaacaaaattaagcaaaaaagacctttccccaaatacaatcattactttgtatgacccattcctaagaaagctacattccatttcagaaaacatgaccacttaaggtacagttaaaacaaagtcgttgccttcaggtgcttactttctgttttctttaaattaactgctgaaatgtttatcttgtgttttgtgctgcattcctgaaaactgtaacttttaaggacataggcctcatctttataaaggaagaagaaaacagcaaagaggtgtctcatttgggaggcagaaggttatgaccaatgctggaagtcttcctcttccttacttgttgttcaacaagatgggttctgtggtgtcgcatgaggtgtgagttggaaatgaaagctgcaccacacttcttatattcatagggcttctccccagtgtgggttctctggtgcaccgtgaggctcaacctctgtctgaaggccttcccacactcattacacatgtaaggtttttctccattatggattctctgatgaataagtaggtatgagctacatgtgaaggccttcccacattcattacacacaaaaggaagatctccactgtgaattctctggtggacaaaaaggcaagagagctgactgaaggcttgcccacattcactgcagtcataaggtttctctgcagtgtgaattatctggtacataataaggtgtgaaaaacaactaaaggttttcccaaactcacactcatatggcttctcaccagtatggcttcgctgatgtacaataagatttgcaatctgcgtaaaggctttgccagaatcgttacaggcagagggcttctccccagtgtggatcctctggtggacaatatggtttgagctcccagtaaatgttttccgacactcattacatttacagcatttttctgtaatgtggagtttctggtgccgagcaagttgtgagctataactaaaggctttctcacatttactacgcctaaaggttttttctaaggagaggtttttttgatatacagtcagatttgaactctgattgaaggctttcccacattttgagcaaacataaggtttctgtccagtgtggattctctgatgcacatcgagctttgcactctgaatgaaggccttcccacactcatgacattcaaaaggtttctccccggtgtggattctctgatgcacaacgaggtttgcactctgactaaatcctttcccacacatgctacaatgtaaaagactttcgcccaagctgggttttcggattgttaacagtgtcagaattaaggctgtattttcccacagatttcttacatttctggtcttcctcttctttgaagctttcaggtaagtgacagtcattcactatgacttatctgaaatctttcctttccctccttattctctgcctctttaacatgttttctttttcacaagcctctcttaactcaggtccttaaggatcagctttctggattcttcctaatatgatgcgggggttttcagcttcctcacgtatctcagtttttggaaccagtaactgaaggttcttggtttcagcaccttttcttcctcttctgatccatcaaggcctgtctgacgaaactcccctggggcccagactttgatgttctcagagtgcacttgttggctggatgcctgatctgggaagttttcttcttcctcctcctcctttttcaccttcactgggcggcatgggcctagggccatggcttctctcaattctgcagtcatcttctctgctcagcaggggaacgcctatagctgggagctgcccagcacaggtcaaaccccatctaagctttatgtttcaaaagcttcttcttgagtttcctcccagggccaagatgagtattgcctacgtgcgcagctgagaggcccgaccagagttcactggctctgcagcaggaggctgggggaccaggacctcagctcctactggcacgagaacaatgacccttattccttctttcttaagcaccatggacggctgcgtctcctctttcctgtcaaccacgccaacgctggagggcagcgggttcttgctgtctttctgggactccttgcgcagctagctatttgcctgccgccttggagttggtctgggtcgcagcctgagctgccgctcttggccccagagacgccgcccccgccagcttcttttttcttgttctctcctgccttcagcacctcgaaggggtccgattagttgtcaaataactggtcgaatcggttggtgaccaggcagctgaagccttcctgtaactgcccaggcatgatggttgctcggcggcacattcctccacggattgcagcgggctgcgccgagccaagagcgcgtgcttcagctcttcccagaagatcgaagaacaatttttttgaaatccgcctgtaaatgtcaggcaaggtaaatttcaaaatgaatttttaaagtctctaaaatggagttatgtttaattatgactttatgacaaattaaaagatagttctagataatactattgtagaaagaagcttctcttgttctgggaaagagagacagtttggaaacttgagacaagacccttattgtctgttttattatttactgctaacaaactgcattctctcactgttcactggaataggtgggtccagggaacttaggaaagcctaatgggaagtgagaaaagtaaattatttcttatatttttatgtatacaaatagttgataaaggaggaagtgtagtggtggggtggatcatgcagattgggatacaagagacagtataattattcacaattatagataaggagatctaggcttcacattttcacttctggaatattccactttgacagaacagtctactgtctgcctcagcctatcctggagatgtccttgtggtgggagaggacctgctttctccttgctgtgctcctacagtttgtctctgccagtcatgtccaagccccttgtcttagtgcctcacaagacctcttcctctgaccaggattcaggcaccttctcagaaccttcattcccctgacagcaggaccagccagtctcccagacccggggtagtgcgaagaggagagcagactccttagacccagagtcccaggacacttggcctcaattcccgtgacacctatatcacccagacaactgggaaatggaggtgctggtgccagaacaaaagcataagctgtgtttctcaagtttggactttacctgggctgttgctttattttctagctgtttactgatttttagaagcataaaggtttctttctgtgaagttcctagggacacttaacggagtggggacaggtattccttttgtctttcagaaaggcatgttaagagttagtctcacagtaatttaagtctcacctcctaaatggggtaagagtggggagaaatatatgtgtgtatatttgtgtgtgtatataaataatatatatatactactaatataattaataatgtgtgtataaataatatgtaaataacatattatattatatgtcaataataaaatattatattaatatatgttattacattaatatactatatattataatatataagatataattatatattatatactattatattatatctataacataatatattatatatttatatatcattatataatgtattacatgtattaatatatattatctatatagtaaatatatggggtgtgtatttgtgtatacacacacacacgcacatatatatcctgcattgtttgcttagaatcatgctttgcaattattaactgctttttcttccttcccttcatctaatacacctgaagaatatttcagttagccaaaggtgagaatccgaattcatatttgtattcccaatagatttcccgcagaatcttgggttatcatttcatcaataacagttatgcagatgttctattgctgtgtccaatgcttgcttcgttcatatgaaatttgacttttggccattcaaaaagcaatcagtgccttcttgttgattagcactaatcaccacaagatccttccaatagtaaattttccagagcaaaattctaaacttacagattagtttgccgcagcccctagccctacactgtaaggatcttgctttccatgaggtccattgttaaatggaaatgttcccctggctctatgcagtgctcaggtgtttcttactcagctgaaggactaatgaatttagtttgaatctaaatttggagtaaaaaatgccactcaggagagctgcttctgtgactgcattgccttccaacctgcttttccatttttccttattactccatgtccttgaggagtttattcctttatagcttttgtgatctggctgtaattattttgaaaaaaattttcattatactggacattttggattaagtcctccaaattttcttatttgtgagagtacaagtcactatttacactatggtaaactgcatgcaaacatctgagtacctttctgttcctgtcttcagctgggccagcactaagctggaatagcctatactttgatgtttttctgaggaagtacattttccttttccctcagattcctggtgcctggtatagcacttttttgatttgctcttgttctggcaataggtcaactggctttcatggtccttaacgtttcaggtaaataattccaacagttgtgactggaaggaattcaaatcaactcaaggcatccactctatgttcaaaatgccatgttttgagtgatttgtcctttggttagtaactttaaaaaatatgaggactggaaggagaagctactatttgaggaactaatggaaaatcaagcagtttttgatgtactaacatatacacttatgatgcaaggagtgtgatcgttgaccttcctacttatctaaacattatgctctcagagcatgtggataggtagcatagcctagtggttaacacacatagaaaagtcagactgcctagttcgaatcccagcttcatcacttgctagctatataatctttattaaattagttaactttcctgtgcctcagtctggttttcctgaggattaaatgattttatatttgttaagtgcctagaactgtagctggtctgcaacaagtactatacgtctttgtttaaataataaataaaatgacagtattgttcatatggagaaacaggggtcttaggcagcttaggagtttttctaaagtaacagaatcatttaatggcaggaacaacaatattatcactgcccagaaccctaatggagaactatagctcttaagggtgatgtggggagaaatacactgatgaaaaacaatcaacattattaaagacaggatgggagagagtgggaactcgtcattcatttatctaatggcttagtcagcaagtaactaatgcctactttgggccttgacactataccaacattgtgcagaaagtgattaaaatgcaaaagaacattcacttaggctgggataaacaagaggtcttttgcaaaatctgatgatgagcttgttgatgttgagttgacaaactatgcagcaggtcagtgggggggtgattatcataaaattccatcccttaaacatctacaggaagatgattattttaagatgctttacttctggagatgtatgctttacttctacttagagaatctggcttatgttctcatgttctggttttatatgtaattggtcatgagcttaatttgagccaagcatttgacacagttgcccccagaagttaactcatttgtggattgtataaatgctattgcacaaaaaagaagtatatatatacaaatagtcatagtagaccacatctcagttaatggcttcaagtctagatgaaatgttttaagagggatattgacaaattagagaacattagaagcatttgccagaatactggcagggcaagaaattatgccaaatagtagaaagagaattagatgcctaagtggaacatggtgtatagcccataagaatttgaaggattgtcactggtagaataagatgttattcttggctgcttccagctgaggagtggtggatgggtgactaaggcctataagagagcaaatataaggaagagtttctagatattaaaatcaatttccaaagaaacagcctggcctctaagggaaagagcttcttgtgagtagatgtgtttaggtggggccagatgaacaagctcctgagctctagggattagactccttctgctggataggaggtacaaccaggtcatcccagaggttccttgtgttccaagattctgttactctatgatttcatgacttggatgtcacctcccttaggttggttactctaaataatgttaaaagtcagtgtatgccttaagattgggtgaattgctatgacagaatgagatttaccagagaagcagttaagtctaagaatgaaactactgtttctaagtgaaagaggtatgaataacctaaagataatatttttctctgtagatagaaagaatttgtattataagtctgtgttgggtgtatagtagggcatcaccagaattcaccctaactgggtgaattcatggcagtgatcagtagaatatgtagtttaacaatgaggccttatcatttctaagtagtttctttttgagacggagtctcaccctgtcaaccagagctttgccctggaactcttggagtgcaacggcgcgatctcgggtccctgcaacctccgcctcccaggttcaaacaattctcttgactcagcctcccgatttctaagtggagagttatgaatggcccaaagataatatttttctctatagatagaaataatttgtatgctaggtatgtgttggatatatagcaggacattaccagaattcagcctaactcggtgaattcatggcagtgaacactgcaatatgtggtttaataatgaggccttattcttaaggcaaagctcagaaaagctgataagcaaattagaaaggtctattgaaaagtgtctgttggccgggcgcagtggatcacgcctgtaatcccagcactttgggaggctgaggcgggtggatcatgaggtcaagagattgagaccatcctggccaacatggtgaaaccccgtctctactacaaatacaaaaattagctgggcatggtggcatgcgcctgtagtcccagctactcgggaggctgaggcaggagaatcgcttgaaccatggatgcagaggttgcaatgagctgagattgtgccactgcactccagcctggtgacagcaagactttgtctcaaaaaaaaaaaaaaaaagaaaagtgtctgtctagccaggcgtggtggttcatgcctgtaatcctagcactttgggaggccaaggtgagtggatcacttgaggtcaggagttcaaaaccagcttggccaacatggcgaaaccttatctctactaaaaacacaaaaaattaacaggatgtggtggtgcacacctataatcccagctacttgggaggctgaggtagaagaatcgcttgaaccgaggaggcagaggtagtagtgagccaagattgtgccacagcactccaacctgagcaacagaacaagactcagtctctgaaagagagagagagatgaaagagagagagagagaaagaaaaagaaagaaagagagagaaagacagacagaaagaaagaaagaaagaaagaaagaaaaagagaaagagaaagaaagaaagaaagaaagaaagaaagaaagaaagaaagaaaagaaataaagaaagaaagcaaagtgtctgtctgccaacctgcttccacaaaggcccctcttctgattgtagaagtgcctggtttaggatggcagtgtgctctacctgctgtctggtgagtagtcaggattggacttctataagacaccctctgagaggcttgcaaataccttcagaatcaggcagaggtctttggccagttatttctgaataaagcatatctgcgtgtctgtctgacctaagcctgggaaccacgatggaagatactgtttgaacaacaacaacaacaaaaaaaggcagggaacttaagagagaaatggattttagtcactaagaacacgaagaggaacattttgataatatgtactctatacaaacagaatgcttatacaagacaatcaaagaggaatgggtagttttctaaagagtaaaacctgtatttttaggaacatatatttgtttacaatatattttttcttttttcacccttgatttttaactatttaataattttctacaacatttttttctttttttttttttgcccttttttttttttttttaaacagagtctcgctctgttgcccaggctggagtgcaatggtgctatcttggctcattgcaacttccgcctcctgggtttaagtgattctcctgcctcagcctcccgagtagcttggattataggcacctgccaccacacctggctaatttttgtatttgtagtagtgacggggtttcaccacgttggccaggcttgtctggaactcctgacctcaaggcccaccttagcctcccaaagtgctgggattacaggtgtgagccaccgcgcccagcctgcccttgatttttaactatccctcctgtgaaaatttaagtctttctgtgggttaaagggaactggtaaagagcactggatttatgcttgggctggaatttccctctaggtttggatgtaatgaaggcagtagagatttgggtttataacagaggcagatttgtgaaactataggagttgaagcctgagggtccctcacttgcagagaccccttccagggtcctggaaggaaccctgctaatgtgttattatggtcattttttttataaaaattgcaaaacataatgtgtttcagccatgactggttaagatcattgtcttcttccaattcaactttccctcctttctccttccctttctagttgggtggcattaaagtggtcatgcgcattttgtatttgtaattatgtattttttttttttcttaaaaaggacccccccaccaaattgtataagtttcaggccctaaaaacatggatcttccactgggtgtaggaatggaatgagtaacaatttggaaattgcctgtgtagcagaatcagcgaaaagtcagagtcagcagtcaaaatgtgatggggagagtgagagtaaattggaatccataatcccaacagcatttgacagtgggaaaatggagctttttcccccctctttagggttcattttaaagaattccatgcaaaggatatcatgaattgagaaatatacatcagattcatcagattaaaaattttttttttttttttgagacggagtctcgctctgtcaccaggctggagtgcagtggcgggatctcggctcactgcaagctccgcctcccaggctcacgccattctcctgcctcagcctcccgagtagctggaactacaggcgccaaccaccatgcccggctaattttttgtatttttaatagagacgcggtttcaccgtgttagccaggatggtctgatctcctgacctcgtgatttgcccgcctcagcctcccaaagtgctgggattacaggcgtgagccaccgcgcccggctttttgttgtgttttttgtttttgtttttgtttttttgagatggagccctgctctgtcgcccaggctggagtgcagtggcacaatctcggctcactgcaacctccgctcccaggttcaagtgattcccctgcctcagcctcccgagtagctgggattacaggcacgcgccaccatgcccggctaaattttttgttttttagtagagacagggtttcaccattttggccaggatgatctccatctcctgacctcgtgatgtgcctgccttggccttccaaagtgctgggattacaggcgtgagccactgcacctggcctaaattctttttaaaaatagcaaattcttaaaaataatgcaaattgatgatgaattatgaaaatcatgatgagaaactcctgactgaagagagaaattgttggaaaatgattctccttttcctctactactttatgtaattataaagcctttttctaaagttcctttctgacacagaaatactggccaacagaaattcaaaggaaagttgagacttttgaagttcaggcaatttatatggtgtttcaggtgttactacctctaatagtctatcagtaaaaccctgataggggatggtctctcctttttgccttctactccatctcttctcacacacacttgtgattctttttctttttttaaaaaattttattattataatactttaagttttagtgtacatgtgcacaacgtgcaggtttgttacatatgtatacatgtgccatgttggtgtgctgcacccattaactcgtcatttagcgttaggtgtatctcctaatgctatccctcccccctccccccaccccacaacagtccccagtgtgtgatgttccccttcctgtgtccatgtgttctcattgttcaattcccacctatgagtgagaacatgcggtgtttggttttttttccttgcgatactttgctgagaatgatggtttccagtttcatccatgtccctacaaaggacatgaactcatcatttttatggctgcatagtattccatggtgtatatgtgccacatttgcttaatccagtctatcattgttggacatttgggttggttccaagtctttgctattgcgaatagtgccacaataaacatacgtgtgcatgtgtctttatagcagcatgatttataatcctttgggtatataccccagtaatgggatggcaggttcaaatggtatttttagttctagatccctgaggaatcgccacactgacttccacagtggttgaactagtttacagtcccaccaacagtgtaaaagtgttcctatttctccacatcctctccagcacctgttgtttcctgactttttaatgatcgccattccaactggtgtgagatggtatctcatagtggttttgatttgcatttctctgatggccagtgatgatgagcattttttcatgtgttttttggctgcataaatgtcttcttttgagaagtgtctgttcatatccctcacccactttttgatggggttgtttgtttttttcttgtaaatttgtttgagttcattgtagattctgcatattagccctttgtcagatgagtacattgcaaaaattttctcccattctgtaggttgcctgttcactctgatggtagtttcttttgctgtgcagaagctcttgagtttaattagatcccatttgtcaatttttgcttttgttgccattgcttttggtgttttagacatgaagtccttgcccatgcctatgtcctgaatggtattgcctcggttttcttctagggttttcatggttttaggtctaacatgtaagtctttaatccatcttgaattaatttttgtataaggtgtaaggaagggatccagtttcagctttccacatatggctagccagtattcccagcaccatttattaaatagggaatcctttccccatttcttgtttttgtcaggtttgtcaaagatcagatagttgtagatatgcggcattatttctgagggctccgttcggttccattggtctatatatctgttttggtaccagtaccatgctgttttggttactgtagcctagtagtatagtttgaagtcaggtagcatgatgcctccagctttgttcttttggcttaggattgacttagcgatgcaggctcttttttggttccatatgaactttaaagtagttttttccaattctgtgaagaaagtcattggtagcttgatggggatggcattgaatctataaattaccttgggcagtatggccattttcacaatattgattcttcctacccatgagcatggaatgttcttccatttgtttgtatcctcttttatttccttgagcagtggtttgtagttctccttgaagatgtccttcacatcccttgtaagttggatttctaggtattttattctctttgaagcaattgtgaatgggagttcactcatgatttggctctctgtttgtctgttgttggtgtataagaatgcttgtgatttttgcatattgattttgtatcctgagactttgctgaagttgcttatcagcttgaggagattttgggctgagatgatggggttttctagatatataatcatgtcctctgcaaacagggacagtttgacttcctcttttcctaattgaataccctttatttccttctcctgcctcattgccctggccagaacttccaacactatgttgaataggagtggtgagaaagggcatccctgttttgtgcccgttttcaaagggaatgtttccagtttttgcccattcagtatgatattggctgtgagtttgtcatagatagctcttattattttgagatatgtcccatcattacctaatttactgagagtttttagcatgaagcattgttgaatttttacaaaggccttttctgcgtctattgagataatcatgtggtttttgtctttggttctgtttatatgctggattacatttattgatttgcatatgttgaaccagccttgcatcccagggatgaagccagcttgatcatggtggataagctttttgatgtgctgctggattcggtttgccagtattttattgagaatttttgcatcaatgttcatcaaggatattggtctaaaattctcttttttggttgtgtctctgccaggctttggtatcaggatgatgctagcctcataaaatgagttagggaggattccctctttttctattgattggaatagtttcagaaggaatggtaccagcttctccttgtacctctggtagaattcggctgtgaatccatctggtcctggactttttttggttcgtaagctattcattattgcctcaatttcagagcctgttattggtctattcagagattcaacttcttcctggtttagtcttgggaggatgtatgtgtcgaggaatttatccatttcttctagattttctagtttatttgcgtaaaggtgtttatagtattctctgatggtagtttgtatttctgtgggattggtggtgatatcccctttatcattttttattgcgtctatttgattattctctcttttcttctttattagtcttgctagcattctatcaattttgttgatcttttcaaaaaaccagctcctggattcattaatttttttgaatggttttttgtgtctctatttccttcagttctgctttgatcttagttatttcttgccttctgctagcttttgaatatgtttgctcttgcttttctagttcttttaattgtgatgttagggtgtcaattttggatctttcctgctttctctggtgggcatttagtgctataaatttccctctgcacactgctttgaatgtgtcccagagattctggtatgttgtgtctttgttcttgttgctttcaaagaacatctttatttctgccttcattttgttatgtacccagtagtcattcaggagcaggttgttcagtttccatgtagtagagcggttttgagtgagtttcttaatcctgagttctactttgattgcactgtggtctgagagacagtttgttataatttctgttctcttacatttgctgaggagtgctttacttccaagtatgtggtcaattttggaataggtgtggtatggtgctgaaaagaatgtatattctgttgatttggggtggagagttctgtagatgtctattaggtccacttggtgtagaactgagttcaattcctgggtatccttgttaactttctgtctcgttgatctgtctaatgttgacattggggtgttaaagtctcccattattattgtgtgggagtctaagtctcttagtacgtcactaaggacttgctttatgaatctgggtgctcctgtattaggtgcatatatatttaggatagttagctcttcttgttgaattgatccctttaccattatgtaatggcattctttgtctcatttgatctttgttggtttaaagtctgttttatcagagactaggattgcaacccctgcctttttctgttttccatttgcttggtagatcttcatgcgtccctttattttgagcctatgtgtgtctctgcatgtgagatgggtttccttaatacagcacgctgatgggtcttgactctttatccaatttgccagcctgtgtcttttaattggagcatttagcccatttacattcaaagttaatatcattatgtgtgaatttgatcctgtcattatgatgtcagctggttattttgctcattagttgatgcagtttcttcctagccttgatggtctttacaatttggcatgtttttgcagtggctggtaccggttgttcctttccatgtttagtgcttccttcaggagctcttttagggcaggcctggtggtgacaaaatctctcagcatttgcttgtctgtaaagtattttatttctccttcacttatgaagcttagtttggctggatatgaaattctgggttgaaaattcttttctttaagaatgttgaatattggcccccactctcttctggcttgtagagtttctgccgagagattagcttttagtctgatgggcttccctttctgggtaacctgacctttctctctggctgccctgaacattttttcctgcatttcaactttggtgaatctgccaattatgtgtcttggagttgctcttctcgaggagtatctttatggcgttttctgtatttcctgaatttgaatgttggcctgccttgctagattggggaagttcacctggataatatcctgcagagtgttttccaacttggttccattctccccgtcactttcaggtacaccaatcagacgtagatttggtcttttcacatagtcccatatttcttggaggctttgttcatttctttttattcttttttctctaaacttctcttctcgcttcatttcattcatcttccatcactgataccctttcttccagttgatctcatcggctactgaggcttctgcatttgtcacgtaattctcgtgccttggttttcagctccatcaggtcctttaaggacttctctgcattggttattctagttatacattcatctaattttttttcaaagtttttaacttctttgccattggctcaaacttcctcctgtagctcggattagtttgatcgtctgaagccttcttctctcaagtcatcaaagtcattctccatccatctttgttccattgctggtgaggagctgctttcctttggaggaggagaggcactctgatttttagagtttccagtttttctgctgttttttccccatcttggtggttttatctacctttggtctttgatgatggtgacgtacagatgggtttttggtgtggatgtccttcctgttcattagttttccttctaacagacaggaccctcagctgcaggtccattggagtttgctagacgtccactccagaccctgtttgcctgggtatcagcagcggtggctgaagaacagcggatattggtgaaccgcaaatgctgctgcctgatcgttcctctggaagttttgtctcagaggagtacccagccgtgtgaggtgtcagtccacccctgctggggggtgcctcccagttaggctactcaggggtcagggacccacttgaggaggcagtctgcctgttctcagatctcaagctgcgtgctgggagaaccactactttcttcaaagctgtcagacaggtacatttaagtctgcagaggttactgctgtctttttgtttgtctgtgccctgccctcagagagggagcctacagaggcaggcaggcctccttgagctgtggttggctccacccagttcgagcttcctggccgctttatttacctaatcaagtctcagcaatggtgggcgcccctcccccagcctcgctgccgccttgcagttcaatcttagactgctgtgctagcaatgagcgagactccatgggcataggaccctccgagccaggtgcgggatataatctcctggtgtgccattttttaagcccattgggaaagtgcagtattagggtgggagtgacctgattttccaggtgccgtctgtcacccctttctttgactaggaaagggaattccctgacctcttgcgcttcccaggtgaggcgatgcctcgccctgctttggctcgcactcggtgtgctgcacccactgtcctgcacccactgtctggcacaccccagtgagatgaacccggtacctcaattggtaatgcagaaatcacccgtcttctgtgtcacttatgctaggagctgtagactggagctattcctatttggccatcttggctcctcccccagatcacacacttgtgattcttgctggcattcacacttactctctctttattttttgagacagggtctcactttgtcatccaggctggagtgcagtggtgccatctcagctcactgcagcctccacctctggagctcaagggattcgagtagctaggactacaggcgtgtacctccacccctggctaatttttgtattttttgtagagctggggttttgccatgttgcccaggctgatctccaacacctgggatcaagcagtctgcccaccttggcctcccaaagtgctgaaattacaggtatgagcctccatggctgggcacttactgtctttttaattatcagcttgcaaatgagaaatctgcccaaggagcctgagcttggtgaatacaagttcatttcagccccattggtgagtttatgattctatgagactttaaagatgtattttatttggacatgttaaaaaaaaaaaaaaagaaccgtgtgtttcttcacaacatccaaaataattattttattggtattgataattattattgaggaatagggaagtcatgtatgttatcaaccacttcctaaatgatacctagttaacacgttaggggagggaatcgaatctgaaagtgatacccatttagtgaagccaagcaatgtagcaagagttgagaaaaacttataaagggacctcttagcccatgtccataacattgtcgttaacataaagataggttgccagagaaagggtaactgtatggtcaatttagccaggtctgaactctcaaaaatcaagcactctcattctgttagggtgaagtcagagaaaagaaccttcacaaggtttgaaaacacagttgtaacatactgggctgtgttccagggctagcatttgactctgatttttatcttgtgcttagaaccagcctactgttgtctctgtgcagagagagtactaagtaggtactgaataatacttgctgtccagcacatagctctgtgcagaacgagcactaagtaggtacttaataatgcttgctggccagcacatggatggatcatgtttataagtgtgtatcataaacactttgccttgaggaaattgttttctttttagagttttcatactgtggacatccttaaaaagcccagaaaatgtatctttatggattgacatgtgacttcttacatatgaagttagaagccaatgaaatgctgttctttggactgaactttcaagactcatgtgtgtggtgtctaattcattaactaaaaatatgattcatatttaccttatgtaggactacaggtatccacatatccaccattaggatattctttaaatctggtagtttggaagatttccagacattgtaaagagtaaatgcatcagaaataagcattttccagaagagggaggtatgaaattgtaatgattagcctgttgcttagtcctggaaatgtgaaatcagataaaaatgaaaaagatgctttccttgcattctcttccagaaatatgcagcctgctgctcttttgtcttcagtgtgaccatgctgccctgaggagagcccagaactgtttttaaattcaaaaggacagctgctttctgctcactcaggtccactgaggcatgctccaagacaggaaaaaggtgcttagcggggctctttgatagagattcaatatatgaattttactttgagaataaaaagctcacccacttttaaaaggttaatcaaaagctcattgtagtgtattcttcctttcctatgcagtttcctatggaaatggaatcagtttaaattctggcctcagaacagcaatatttttcacagaggcagtccttctgccaagtggctctagaagtacccgtaatatccatgtcaggagtatgaaaaatgaaagggatgaacacttccttcagaaattatacctttgattcctttactttacggccaggcaggaagaatcctgagagaggtctttactgaaagttcagtatttatgaactacatactgaaaaatgaaaaacgattcctagcactgagttgcttaccctgtcaagtttacccattattttcaggctgttgagcattgtttgaaaaatcgatctgagagctaaatgagactctgtcccttaccatggtcttgctgttataaattcacactgggctatttccattccctaagtttgctttgccctttcctaccctttacctctatggtcttccatccggtaaattttctctcacccttcctggtctagctctatttcatcttcacttatgaaggcttccttgttttccttttttagaattaattgctaattcctcactgctctctaagcattaatacccccatcatagccttcatcataatatgttttgtgctgtagttatttatgtacttacttgtttttcccccttctttgctctttgattaaatgcatgccagatccaactttacagatgagaaaaatgagctctgaagttcaataacttgcccaaggctacccagttagaagagttatggacttcactctgaatatggtgacttttgttctagtgtgttgccttctctagtcttcttaagaaaaaccttgtcttcttttcttttttccttaggttgacttattctatacattagaagtttctaaattttaatcaaactgtcattccagggtcatagtcagccacatgtaaatcagaatgcagttttacatagattcattattactgtgcatggagattagaagccagctcacaagaagacttaatttggaaagatatgtaaccaacttcacgtaagtgctagcctttcattgatttctcacctccattctatattcctcctggcacttgttttaaatctgttctactgaagtccatactctacccccttgctctcagccgatgatctgtttacctgctctgagaagatttagatcagtagttctcaaactttaatatgtataaaaatcacatgcagagctctttctaacatagtttcccgggacttttcccaggaattctgatttcagcaggtcagggtggggctcatgaatgctccattctaacaagctcccaggtgatggcaacacagctggtctgaggactacactttgagaacctctgatttaggccatcctctgcaataggatgtcttctccaatacatcttctctggatatttatccttcctctccttctatgagaattcagtcgttctattctcaggctgaaccctctcaccacgagcttttatcccatctcatttcatctatttcaggaccttgcttcaacttggctctctttgaatcttttatatcaccctctcaattgctttttattctctactgctttactaataaaactgttcctttctcagttgtactatttaagatacatctaatgattgtaagcaaaattattttctctaagaatggtcgacaatttcagattcaactcagctggctaggaactaagtttctgtaatttgggaattggcttgtagagagcaaaattaagaaaccaagtttggccgggcacggtggcttacgcctgtaatcccagcactttgggagtccgaggcaggtggatcacgatgtcaggagatcgagaccatcctggctaacacggtgaaaccccgtctctactaaaaatacaaaaaattaaccgggcgtcgtggcgggcacctgtagtcccagctactcgggaggctgaggcaggagaatggtgtgaacccaggaggcggagcttgcagtgagcggagatcgcgccactgcactccagcctgggcgacagagcgagactccgtctcaaaaaaaaaaaaaaaaagaaaccaaatttaactttttttaatggatgtgagtggaagagactaatgagataacacaaaagagttaacttcttacatttctgtagtctaatacgagatagtttctccaggaattaacacagcacatctggttcactgacctgagtttgtttcctggtgaggcattgcagtatcatccatatctcaggcaaaggtactccagcattttgtagttaagcagttggaggaggagtagggagaactgctgtactttgaaacatttcacagtggactactttgcattctaatgatgttctccttacttaaggactttgttatgtaaggatactttgtccttctgataatcacttacacttttcttctgtgttcatgtcacttcattaatcctgattacttgtaatgaatcataatcttacccacttattcttgtgtgactcattcctacttgtattcttaatagtattttctatgtctgataacacattgtcaattgactatgctatttttaacgtaagcgttggcaaaaaggtttacttagagaaaagctctacatttaattccccggtgcctcagttcccaaatttgctaataaagattatacttagctgtcactccacgtttcatcagtaggattaaaatgaatagagatcatgaaataagacaatgaaaaaagataattataatggaccagattgagaaatccctacaaatcaacagaagcgacctgccatgtcagattcctagatgcagtttatttactcagtgggccatatttcttccttattctttctttttccatgatgccttccaaaactatattttaaccaggagggaaataccatttgtcttctgatataggaagatcctactgagagattatattcatatatttcgtccatcggcctgtaggtggaattgtatttaaaatactaataaaggttattattgcttatatatctaaaaatgctccaactgtccaaacaaagcttatactgttgatgatatttatcagtggctctgaacacttgcatatcataaaattctccctcaaaatttaaccttaaactctttcaggcttgtcttggtcacagtgggaactgaggacagctgctcatgttttttgatagaacagctcttaacatgcttttgctcttgcctcccactgcccaacaccagctgcatacacacagtctacttgctgtgtgcatgctctggctcctgtctccttttccttcagcctagttagcctggttttgtttggtttcatcatacaatgtatctattagtaaaacttttatgaactctgattatagtactaaactcataataaagtaatcagaacttcatttattaaaacactgtcttgagcttattttttaatttagtacacatgacaatttggtaaggtaggaattttcattccccttttatagatgggaaaactgaggtccaggatataggtaacattttcaaagttaactcgtaagtaaatggcttagctggaatttgaacccaggtttctgcaattctaaagcccatccttttaactgctatgctatgcgcacaattactgtattcttatttgctctctgaaatacaacaccttattctcatttcatctgctctttctgccctgtacacttcagtttctgctctatagatacctgctcgtattgtgacatctcaattttttttgtaccttggcagggttttgattgatgtattggtgttctgaactctttagcatatgtattaatagggaagacctaccaaatatttcatgtaatagggattattttgtctacctattttatctttctttataatgtaagtttgtagagggcagaaactataaattgctcagttagggactccacattgagccaagcacatacatacttgacccagagaagtcatcaccatctttatcgccacagctaacatatgggtagtgctcaccatctaccaaacatgtgcatggattattttatttactcttcacaataaccctataaagtagactatgttgccatccccaaggttaaaaaactagcccaagttcatcgagttactgcatgatagagtttgagtctaaccaacaccaatctacacgtctgtcaacacagttaactatcccacacttctcagtggaatctagagttccacttatttcctattccttccattcttcactatatgtcctctttgccttcttatcctgtttctctacttctcactttctgccctatacgtatctgctcaatcttcaatcttctctgccttaccctctctttttcaattttgttctcgttctgtcctatcctgcctccccactcttcttacctcattttcctagtcctcttttcttctttttttcacctttttacctcttacatatttcttttttaaaagtaacttcaagcttgataatagattcttcaacgctcttagcaatatcgtatcctaaccataataaaatgatagtgtgctaggtgtaaacagaagtagaatatgaaattgaaatgaagaatctctttactttttctattagaaacataaataatgagtgactgtaacatcttggtctccataatttctaagtgttaaataaaacacatttctttttttatttaacacacacacatccacacacacataaacttgttttatgcattgattgccatttattgagcagcatatttttggaaatgcaacaactacaaaagaatttttaagttattatcatacagtgacattaataggctcatcactttgccttctttccttgttctatcatgtagagggttgctttagagatcattgtgtattgatatgaattatcattgaagttttattagtctggatgtctcatcttgggcattttgataaatttcttttgctccaaatccagaagttatggccattcatctttataaataagactttttaaaaaaggtaaagtcataaaataaatatttcaaagcagtgttggatatagccagctgaataaactgccctttctagttaactttgaactctaaaccttatttaaatatcctccctttttttctgtaaagaagacgagaaaaaaaaacaatttcagtagattctaaaagaaaatatagcaagaacattttcataagagatatctcacataaaaagctgtaaaaattgggcaagtatttgcacctaaccagtagaacttagaagagaaaacatgaaatgaacttcttagcttatggaatggtgtggataggtttgcattacttagatgttcacagagctctagcatttacttactgaaacactggaatggttcatatccctgtggtttccaccttatttcttccagaaggattaggttttatgctgccagagaccacattgactcttagtaatgggatcactaaattctggttcacaattttgtgcatagagagattgcactaatatctcaaaattgtagctatgattataaccctggcatagaaatctgagctatgctggcagtgtcatgctgtacaatcgaatccacctgattatctctgcatttgtgacagctgggctggccttcattggcatatgcctctttgctgtgcccagggctttgaatgcaaaatgaaagatcagcatgatattaggggcccatgatccatagatggagcttcacaagtgaacagcgtctcagctttaacatggcccccagtatcctgctttatctttctggactgaagttcctatgacagatttgttgctttaaaaaagtaattttgcagatttgtccttttttaaaagaaataaagattgccttccatttcctactgaaagtgatatggtagtatccatcttataattgcacagattcaaaaataagccacaagtatgtgtgctgaagtataactgtggactataaaatacagatatcatagcctataatatggagggtagtgtgatgttataaagccatttttctgtgttttacattatcataaaatttaactactgaagggaaagtgaaggttttaatatttaactaagcctagcacttgaagagaaacacatatattttacttggaaaaaaaggaagttccattttggacactgcaaatgacagtgccagctgttgtcataatatttctaacatccgctgaggattaattccaggcccagcaaattcactggatgagcagaaacagccaaagaagtaaacactggagcttatgctgtgatattattaaattaggcatgagacttctacagagttggatatgtagtgaacactggattatcatgcctgaggatcgtttgctttgtgtatatctgcagaaaattgaatcctgaacttgctttcttctgcctcttggccctcttcctctgtagaggtatactcagaaaatgtgatctcatttgaatataaacttttctattaatattcattaagtactcatacaatataagctgaggaaacaaagtggtgggtgtaaaacacaggcctcatgtaaagagcttactttcactacagaggcaatgtagcataatgaagcagagatgggtttcagaggcaggtagaccagaattcaaatcctacttctcctaagtatggccttgggcccatcacttaaatttctgagactcagtttccttttctatgaaaggtagatactaatcatgctacagagttctattaagaattagaaatatttaaagatacttagaccactacaaggtagctatttttctagaacaggcataccttattgtatacattctatgtttctagaacaggcataccttattgtatacattctatgaaacagaatatggaaagtgctaaatgaaaggcacaatcagagaattccccaggccctcaagaaggaaggcggaatggatgaggaagtctgctgtccaaggggtgggccagagctaaggcaagatttgtgggtgggccttcactaaccaggcacagggagagggcattccaggagcagatgtagatctggccaaggaattaagacaggaatgcaagtggcgttttccaggcaaaagattaggaagttttagatcagcctggatatggagaccttgaatagcaagccgactgaggaatgcatgaaagaatgactactagctggaataagagataaatctcaaggcctcttttctctttcacctctcctcttgcccacatcatggacagatagttctggcttttccttatactctgtttctgtaagcaattttaagaaggcagagtgcataatggtattacttttatgtctgcgtgtgtattgccaccatgaagcctatagttttgcttttcaaactactagattgtgaccttgtaatgatctggcaaaaggctgaatttttaaaagcagtaaatccatatagtggataatattgggaaaaaattagggctaatactgaggaatgagaagattaggaaagagataaataaaatatgggtggtataaataaaaattaaagtgaaaatgtggggaaaggactgcttatgattcaccttacaaaatttctaccttatggggtctgttttcactgtcagttctttctgtgaatgcatgttcatgaagatactgaaggctgtttttctataggcagctggtggttttctgctgtaggcagaagtggttgaggtaatcctagggaggtgatgctgaatggggctgtggttctactttatgtaaggttattatatgtgaaagaaagagtaatttttaaaagtaattaactagtggtagattctgaactaacattagcaaaggttgattataaatcagattttatttttactactgatttagaaaaaatctttggagaaatagatttggaatggttaaatatcactttagggagcacattttggtatcacagcttaaaggtactcttaagagaaagctttacaaatggggcaacctgaaaagacacatttcatgtgcattcaaattcaagataagacccaaagctctgttgccaaggtaaaggttttgagagttaaatgggaatttggaaaataatatgcaaaaattgacttaaaatgtagataagcctacaagtatttacagggtggagacatcagagaatgtaagaaatagtttggatcactaacaggaatgtgtaatgggaagtcaaaatctatgctgtcaggaaaaattcatattattggatagaaactgtattatttggtacatttaagataaaatgaaaattgtgttttcaaagggttacgcctcgcagtggatgagtgattggggcgttttctggtttcagtgattctgtaggcagaaaacagtttttactgccaagtgtgtcagtggaggtggggagacagagaccttgctgtgttaagtgaaatctgttgcttaagaataaagctgggatttctgtagaatggagaaggagtttggtattatcatattatcaaaaataactgctctttgaaaagtagattttttaaagtttgattatcaagtatttatttaaaatactgcctaagtatttaaacactttcaggctctgattttgttttttttacaaaggaaacctatgcctaaaaattattttaagtagttatatggatacatgagctacacagtttcagacctgtgtatatgactttctaagaggtctatggtatccaataataaatgattttatgcagggatttaacacataatgggtcatgcattatctataccttgttaatgggatctatatagagtgatagcagaaaagaaagttaattttaggatcctttaatgcctataaatttagagcaaaagaaatatttctaaaagttcaacttttgtatacatatgcccaatcacaagttttacagacatttttacacgtttaggcctgaaatatttgattccgctcttatttgtcaagatacaatataattacattagtaaaatgcaaacagggcagataagttttccttctttttcctatgctatagtcatgctgcaaaccctccattacagttttttggctgaggtaggtctagatgtctagaggccaactaatacagttttatataatcaacatagggaagtcatttcagagactggcattgagctcttggagggaagaaaatgaaccttaaagcttcttgggaatatccctcactgcagcagagtttatgtgctctaatggatgctccgtaaatgcttgagagaatataagtcccataggttagcatatacttaattctacctatcatggaaacctctccatacattctatagctgaaatattttaggagctcaaaaggagtaacagaaactaaagggaacaccagctccaagattggatttttaggctttctttctagtgtaacacttcccttcctgttgggccatcggcaaccatatcctggctaattagaagtgattttcaggggaaaggaagaggtcataagttcttgcctccctattttccttcttgttgggtgctagtaacttaccttaagaagtaatgaagtcctagtaaaactcctaatattcagaaaccaactctcattattcaaacatgttgaggaaaaaatgtctccttgcgtcctcttctgcttaaaactcccccagtaccatcaagcatggacggatatatgatagtggcagtatccagaagacacaccatctatgtaacaaaccctggaaataaagtatggtataatcctaagcattcgctcagcactcttgcttctgggaatttgctatgagtcagccacaggcatctctgtgtaccttcaagcccagattagcacgtatgggaggataagagagaaagtgtacttcctgaatacatcttgggtagagtaaactaatccttagctaggttgatgacatccttacccagaatttaaaagttcagtagagactcttcttgaaatgttgaatttttatttctgcttgttgccctctatagatgagtgaaatgcaatgaagatattcatggctactataaaaatgcattagttctttttggtgagctacttgactatcagagccaaatatgtaggtagttggaattaaatttccaatttagcatcccccttagaagggtgatggaagctcccatatcttggtatttctctttctgagtatctgctgtctcactgaggcaacatgctagcctccatgttgtattatttcacaggtatagaactaagtgacacattgccaattcccacgccccccccccattttctttgatggaggtagattacatttataaggtgtagatattgcttgaaggtacttgttctttcttataagtaagcaagaaagagagcagcaaataatagctaggaggaagatgtgcccacaccacattcaggccacttagtctatctagtaagatagagtgtttcaggcatcaagcatgtactgggagacatgcatacagaaaaagaacaagcaatagactcctttgagagtgacatggtaggtctgaagagtgaatgtaactttttgtctccatcccctcagtgattcattaattattcattagctgtttttttccaccaggattacaatcattttacctttgcttgccagcctagtgggttattaacagtggttactctatttatttacacattttccttgtgtatgttattcatcctgtattagttcacccccacccctagtcaccattcttttttcttttgtttggcctttcatggctaccatattaccatgtgatcagaaaaaaaatgcactggtgtcagaattaggccaacacagacatatgggatggtaggttcatttgggttggatagagagctgtttgaaacttgtatacacatttttcaatttcaagaagaaacatctgcagtaaaggaagaactgcatagtttgcagtggtctaatggaggtgaactcaggaatctcagatgcatttagctctacaagtctccattatacaaatgatgttgaatgtttcatctcttgctacagattagttttgggccatcatgaaaaactttcctgaagattaagtcaaacttatctatgcatgccttctttggatacatagatccacctttgacagctactctgtccactaattctgtcaagtaggactgagctttcttgaacacctctccttttgttaacaagaaggagaagaagaaaattaaacactcctggcatctgcctggctgtgatttagcccttggtaaaaagtattacaaattgagacggtgccagactgctcctgtgattcatctcttctcctgtcaagaccagttgaggcgatgcaattgggaacctctctagtttgtgaagagacactttatgttggaagcaacagcataagcacaatagtacttaggcattcaaagcagagagaattggttcctcctgattgggtgaacaatcactgcaaattaaggtcaaaagtattgtcaaccaattcagtgtactaggcttcttcatcatttcccatgacttgttctctcttaggagaaggtttagcaaattggagcaatttttttttttaaatcttggtgcagcgttagtgataaaacacaagaaagtttaaggctggatatagcatgtgcatctatatcaagatgaagatccatagagagatgtgcttgatcttgggatgctggatgaaaatccaggcactgtgttgtgggagcctgatttctgaaagttggggcatcattgtttggcttatgacgtttataagtgtcaggtacgtcttgtcccacagaatacttgttatagctgttaaaggacagattgtcttcaagacaactggtacccatgccagagtagggtatattctgacagaaaatccatttactctcatctgtaatttatccccttagttgaaacatgatcccagtgtagggcatttacttttcacactccgtttaaatcagtgtggtttcttcctaccttaatgaattttacctcatttctttgtcttgcaaaaacccagggcagaatggtaaaatttcaaaacaaatctttcacaaggctggaactagacactctgttgggtcacatgcaagttatttgcagaagaggaacactttgcatgtgaataagagaaagcaaagcacttacaccagtattcagtgctcttggggccaggagtgaggggccttccatgtttgcaggacatctgtttgggccttaagttctgctacagccccaagtccttatctcatatctgcctggtgtcctatttttctgcttaaagagtcaaagactgaaattcttatccttgtttcccattcattcctaagttactttagccttcacatggagccaccatgctgtggcccacagagtgtgctattcacttaaacttatttatcttaacctttttgtgaaatatggttgcattctttgactttccttgcttgtcacagtttacattaatcctggaacttttgagtcttaagcgctacatgatagtactctttctaatggtttctaatgttacacgaatgcctctctttcccatttcatccctttctctctgttggttttgactttaagctctctggctgtttcatggcaatgattattggtgacagtattatctattaccaagtgtttcttgttcagttttgcatagtttcaatgtccttttaagcaaggattgccaaactacaggccacctgtttttggagatgccatttaattggaacactgccatacccattcatttacatatcacctatggctcctttctcactacaagggcattgtttagtagttgaaacacagaccttatgtaccttcacctcaaaacctagaatatttactatctgactctttacagaaaaagtttgctgatctctactttgaagaagagaaagtcgtcagatacatacaatgccaaagaactgctggctatgaaagggatattgtagaattctgcaattttcttaaagaatggaaaacattggaaaagagtcacctgtttacaggtgatttgcatttctataggtatcagaataatgtgggtgcttgtaggttggggaaggaatggcaggccttctctctctgtcagtatcttcaggccctgaagtcatacaatcaatggattgcttttcctcttcacttttccattttgccataattttgccaagggggaggttggaagtgggttaatattttgcgttagaagagcatttggatacatcctgataattactttatctcagatattcttagattctctctagtgaaggccacaccttctctgtgcctcaggctggcatggcccaactgtgctacttaccttgggttcctgctgctcagcttaaagggaatctctttcatatgcctagagccttgtttactcagttcaggtctgtaccagttgacaccaagtcaaaaagcactttagacagaagcctgctttgaaagtgctagctagcagcaaataagtctggcttaattctcccttgagtctggagatctgattggaagggtaaaagggagaaagggatgatttatttgttgactggattgactactttatattagtaattatgaggcaattctacccacattatctcatttaactccccataaaaaccctacaagggaggtaatatactttggaaaactgagactcagagaaattaagtaaattgcaaagtccccatgctataagcattatagtctcataagcaaatgtcatgagcttcttctagctttttcttcatgctcacaaaatggttgaaggagatccaagcatcatgtttctagttaaaaagaaggtgcagagtaaaaggcaaaaggcaaacggacaagccaaccaagtttgttctctttcctagatgttctacttggtgacttcagcttatatctcattaatgtgcatcataggattatctctgcaagggaacctggaaaatatagaaatttgtttgtgttaagctgggcaccttgccacctccataaaaatgtgctctataggtacagagcaggagataatcattattaataggcaacttatagtctctgtttcaagaggtcattctggtacctgagaaaattgacaatctctggtctaaactcttacaggcctctcttgccttcatttaagatgaacttgatagaataaagattattgttgttctctaatctcctgggtatgagacagagaggtaacagatggaatgatttctttctggcttccatagcaaaccaaagcatgtgccagtgaagagtggcaactgctacaaatacttagccaaacgtggggaagagtgttgatgctgtaagtctcctagctatgtcgaggcagcaggtgtctctgtagatcagggcagcaatccctttggtaagggcatgaagagggcacttgggactactggattgcatcatcttggcagagaaaaatgtagcatatactggaactctagctgggtagggaattgacaagttgaaccacaagttgactactgttcagtcagcactagcttttatcttccagtcaccattccctgtggctcttcattgatcgtccacaagctccaggcctgggtggtgcctgttgtgatataagaagggaagagtgatggtttccaaaatgtgaacactcatgtgtacagttttcatgttgataatgaaatgctagaaggggaacagctagctgatgcctatgtctttgtccatacctggctacccatgacaaagttgttgttgttgtggttgttgtttcactccaggcacaggcacagagccgcaagagtagaaaacaagaattccatcctgcaaaagaaaactgaatcccccttgcttggtcacttagggaatcaagttcaggagggctggacatgttttctgttgctctgtaataggggctgaaacttagttcaattatggtgcttagctgaagcaccatgactgaatctttttttgagaaggagaaaggagaagattttaaaatgaaatgccataagtgtaacatagtacatatagaggtcacaaacttggaaagcctgtggtgtcttggaaggtcacataaatgtgtgaaacacgccagttgcacacaggcaagcatatgtcccttctagagaaattattgccactgaggaatgctggttctaatctccaccctcccttcccctcccctccactcctgtaaaaaccagaggtttggaattttgcgtgaataactcagtttgttagtgttgacaaccaggcatgacagtagctcatttggaccctttgtccaaatcaggaaacagcagcccttccttcatggcagccctgtagctacgccagtcgagtgtgggctggatttcagcccttactctcctccttagctgagactttgtgccagacacaagctgcccagctgtagacagtgggcccagaagttatcagtgttacatgagcaaaacaaaacatatctacgggccatactcagcccatggattattattttgcagcttctgtagctgcggttaaaacaaagctctggggccagatcacctgggtttaaatctgggttctgcccttcaggcaaatgactcagtatttcttggcctcagcctcctctatctgtaaaatgaagataaatacttgtacttacttaacagggttgttacgaggataaaatcaatactgtggggcaaacacttagctctacagagggtgacacatagcacttaatgttatataataccaaaatcatgtgaaaatctgattttttcacacttagagaatatacagcatataaaatgatgggagagtgcatgtcagaccttcatgattattttctgcttcttggggaaatgcttatgcctctttggtcactgtgaagacagagaactcaaaatagtaagcatcacttactagctggcctactaaggccacaagaacaaatgaagtaaacactctgcttgaaccactgattttgtttgcctgcatgaaacacttgcacaggttgacagctgacatccgtaacaatgacatcctaaaaccattaagaaatgattaaattaagttcagtattatctgttgcaaaagacaaagatgtgtgaggtacgttttagaataacttacaatgaaaacaactaaaaagtgaggaagtttaaagtggtgagtattcaattgcttgagttcatcttctacactggctcattatctggaagctgggccacagagttaatactccatctttaaagactgtcacaggtgtttgcacctaagatgcatcaggttctgcagtaaaaatttggttcctggcactgagacaatgctaggaggagggtgttaacttagtactgaccataatgaaatctgtggttgactgcaaggacctgggttgaaataagactaaatccagtagtattgctccggtaggttcaatcatattcaagtgttcaataatgattataaagaagtgtcaagctgtcatgcttactttaaaacatatccagaaaagagaatccaaggaagtgtatttagttctacctgcatttaaattagcttttttttttatcattacatcaatgtcattaggccctaaatgatattaagagtgtctatgagaccccaaagacaaagattgtcccctaaacttctattcttatttgtttaacatggacttggcccagctacctccaatctaaagcttctttctctagagtaaggtatctcaatctatgcactgttgacattttgggccagataattctttgttcttggggctaccctgtgcattttaggatgtttagcagcatctctggtctctacccactagatgctagtgacttccttcccctcaactcatgacaaccaaaaatatctgtatacattgctgtaatgtcacctggggagaaaatcttcctggtgagaaacactactctagactaagaaaagtagccagatttttaaacacaaaagtgtttttcctcccagaggcaaaaagtgccctagagatggaagaattttgaaaataagctcttccacaaactatactgccaaaatggttagagaaagatcctataatcaccatgcttgacaaatggtgtttttgctaagcctcacagcagctttgttcatgtattgtgttaattgcaattaaataaactagtctagaagtgcgggtcatcatccagcccattcatatccctcctttacagtacacatccagacttctttcagagttttgcttgcccattggtgctcacatataaaaactccgtgggtgggagttagggattcatagagcagagagggacctcagctcttcatgtccacttttcttgttttaaaggacaaggcactgaggtccagaaagtggaatttgcagcacaaattgctatgataaacctcagtgattcagcccctgggatcttcaatgatataggcacagaacatataactattactgagtaaaatgtttaaaattatgttcttatggcaatgttcaaggttttaggcataagtaagacaaagcagagaaaaaataaaaaatatttttcaaattgaaggcttaaaaaattaaggataccctctatgtgccttctgctttaggatccagaatcttatgtttgtttgctctttataacacatgactgtgtaatatcagtcaattgtgactggtaaatttccattaatttgcctaatcatatttagaaattatgcctactaaataaattatggttggaacttgaaaggaataatggcttaaataagtgatttgttctttagtcagaaaaatattctcacgctctctctcataccctcatgaagcactgtcatctccatctagtttataattaaggcaatgggaccaaagtcatcctgttggcacaggatggccatctctgcatccaaatttcttttactaattggagaaaaccactaattgtacattttaaactcaaaatgtctttatgtatatatatatttaaaatatattttattatttttattaatttattaattataattatatttattaaaataataattatttttattaatttatacatatgtataatttatgttttctccatgtggctagctgttgatctaaaggagaaggagcaaggcaggaaaattatcaggttcagtgtttaactgggagatgaggacatcactaaaagaaaggtacagcaggttctactggtatgtacaagttttgattacaaggtgtactcttgccacctggtgtggtgtctcagctaactttagtttctgattaccggggtctctgagacaactctccagggtcaggtatagagctccttttgcccttggcatgttccaaatcgcttccttatgctcaaccttctgagcaatacaaggaaaaattccttgtattggcatgttatgaaggttattgaaatactttaggaaatgcctttgaccttgttttgtacttagaggatgatctcattcagaaatgggtagtgtcaaaatatggaatgtgctagtaaaataagcacacaattcacttaaagaaacaaaaacaagacaagacaaaacaaaacaaaacttgtttgggatgggtgaaaggcatggggctgcaattcatcctggattttaaggttagaagtggttgaaagaaatgtgatatttttacctaaaccgtggtcaactatacttttactttttagcaatgatgtgaatgaagaatggctttgaagactgttggtggatttgacaaatatttatcaagagcctgctatgagtgtcaccattataggtggtagagattccacaatgaacaaaacagagtcctttcttacattttgtgaagggagaccacctctaaacaaatatatatcatgtcaggtagagataagtgccatggggaaaaacaaaatagggtaaggggctaggtggggcaggatcagaccaaggaatttatattttatataagattgtcagggaatgcctctctaattagatgactttttttttaatagaactgaaggacataaaaggacgaggcttatggatatctgggggaagatgtcagaggctgttataaaagttgcaacaggaaactgattaggactcttagcagacttatatgtgcttagaatgaaagggattgggataaaagaaaagaggggagctttgggaaagcattaaactgtggccatagcactgattggataaaccataacattggattatgggtctgcaaatttcttacattttttttaaagtgtcagacccatagccctagtaataagcaacatggtcttttctttgagcatagctgtaatgaacatgttattcttttggagttatcctgcaaagcttatcaaactcaagaagcaatagtttatatgcattgcccaggttgaatattattaatttgggttgggaagtgatatgaccacattctgactgactataggccctagttcagtttacctgattttatgcccaatttttaatgagaagggagcttgctaggccaggcaggaagaaagaaatggggacagtgtcaagcaggaaatgcagaagagttgagtgtaggtaaatcccatctttcctggctttacgttgccttcacatccctcataatgatcttctacctcagtcttcagtataagcagtatgttgttctaaaggtatgaagtcttggccaggcaccgtggctcacgcctgtaatcccagcactttgggaggccgaggtgggtagatcacgaggtcaggagattgagatcatcctggccaacatgatgaaaccccatctctactaaaaatacaaaaattagctgggagtggtggtgcacacctgtagtcccagctactcgggaggctgaggcaggagaatcgcttgaacccaggaggcggaggttgcagtgagccgagatcgcaccactgcactccagcctgagaacggagcgagattccgtctcaaaataaaataaaataaaataaaagtaaaggtatgaagtcttttccaagctaaggcaagaatgctgaaacctcaatcatagcacttttccaaaagagtcttaccttatattctggatctcttcattatctcaagaggggcttctttctctttaaatgtgaaaagaagagaggcatcagctagccctattagcccagggctaagaattgctccagatttttgaatgcttaaccttaaacaaagtcacatgtaccagtggaaagtggctcccctgttttcaaggacaggtcagattttaactacgtgcctcttaggcttgccctgtcttcggagttgttaaacatgcatgttgggagctgttgactgtttttttttttttttctttctttctttttttgccttataatttacttttattttaaatctattatactttgaactgttgactgttagagaaagcagtactggcttaggatcagcagagaatatggttgaattctatttcttaaactgaggagaatttctgtttgagcccagtccaagtcattacttgagcaattttttgcgcattttgctgcttaagtgtttattttttttttgcttttacaagtaattttttttaaaaaagttatcatacactcagcaaacattttttgagcacgtacacaatgcccagccctgtgccatgcatgttcaaaaaaaaaaataggtaacattatatctgtgcttgtgaaattaatacatttgttagaaagataagacttcaatcagtaaagcaatccaagaaggaacaagtacaaatccaggaaggagacattagctcagtggaaagagtccactgaggtaggtagacttgggtttgagtcagaagcaagagattgcttttgtgagatttcgcttatcctgtgtgggcctcagcttcctgttatgtaaaatgggataatagtacctattacattgtcacattggattgctgtgatgacttgataatatttatatacaaagcaaccagtataatgcgtgctcatagtaagcacttattatattattattatttattggacatataattagaaggtctgggttataatcttgattctacaattatttagttttggtaagtcacttaactttatcataccattcatgcatattacctataaagtgaaaggaacagaggttctacaatttatctcccaaattccatggtattttgaaccaaaatgtattgaataagtatttgatgtttgcttccccttcttgttagtgatatttacaatagcaataaaacatcaatatttatttaggacttgctctggagccacgagccgtggtgtgttcttgacattatgttatttactccatgctgcatactcagtgagacagataaccttgtcttgtttcctagatcctaggccatattttatccagtttaatatttctgaaatcagaatgtattatgtagtattatgtagttaataaatatatttaatgtggaatttttttcccaaaagccctttctaagtgagatggaccctcttatgatttaatgaggatgtcttccaagggaaataaatattttttctatatttctgatggtaaagttgaagcatagagaggataatttacatgaccaagattaatgaactaacaaaagcaaattcaggacttgaacttaggtttgttttatttaacaatgctcaccctaccgtacttcttgggagcaaaaaatttaaaaagtttctaacatatattcattagttctttccattttttatagcaaaatatatttgatctgtctctagaatcaatgatagattcactatttgttaacttttaacaggaatatattttagtccctctagcctgactttataggctatgtacccagtacatgaaaatatatagtagcctcagtttaatgttgatgtttatttgatgtcgacatcactagtgacactggtcaagcgtatccttttagataagagcctattagaattatatattccctgtagaaatcttaccttgaccatagtacatttaacagcagatttttctcagactttcaaaatcctgaaagtctgggtcattacaagaaaacaaggatgtggtcataaacagttgattattaagcaaattcattgaaaattaacagcagtattctttgacctcactctttatagccaaactgctaatcttgggtaaattataagattatattactaatccattgacatttagcacaaattagctatcaaatgggtcagttgttactgttggaaacttatgaaaatacattaaagttcttcccatttcctgtatgtttctttctctgacacagaatcttagaggcttttattaggctgggagaacttcccaaataatctaatgactagttgaataattgtttatgatataaaatcagctttgttgtcagaatgattacagtttcagggtcatagttaatagaaaaatatttcagtgaaggttaccattagtcgttgtaagtatcccttgattcaagaagtgaaacttttattgaaaaaactatttgcagagctggagccctgatgggcctttctgaagtttttaaaattaagaaatcctatctctacttttaacaagacatgaatgttagtatattcacccagactaaatgaatgaatgaatgatcacattacacatgcttgggatttgatttccttcctctggtgttcactggactagcagcttcagtactcaagtgcgattgtaaaattacacatggtggaattcaaaatggtgtacatcagtcaggtcctggaaagacacacaatctaactcagaagtttcaagagacttcaaggggaaatgtacagaagtatgggtaggattaaagtagctagcaaggaatgctgagtcactcggaccctagctgccatgagaagctattatctcttctggacctggagctgcagaagaaggaaaccgtgttactctagtcctgagagggccggagccatggaggaggggtcttgtgacagaagctaaagttctggagagacataggctaggccagagcataggaatgtggggaagacatccctgacctctctgtcaaccttctaatctccattgttcaaacccagtaggaagttatccagcattgagcctggagagtcagcccgcagcagtcagcctcctgagtgcagagcagaggaagacctggaatggatatgctataggaggagggccaaacagagagtaactagtccagatgggaaatgctattttagacctcatacactgccaaaaaagaatggcatattcaaggaatccaggaccttgacctcatttgatcttggatttgcatccattttctgatactttcttccaaatactcttgtaagcatctgacagcagccaggagaattgctggtcagttcagcctgtcccagcttcattgctgaggtacatatgtggttaaggagctgagagaactggtctgatagctcaccaaagggggcctttcccaaggaaaataaaataaagagaaaattcattgagaatctgtccagaaaggacagtaagtaggcatggaatcatagtagtaaggaagcatggaggaggcaggtgcataaaaatgacttgtgatatttttgaagctatatgataatgttctgacccacactcttgccagcctctgcaatcttctggaggcttcatatgaaagcaggattggtatgctgtttattataaatagtgagacctgagagatgattactgtcagcataaatggatattacacattgcacctatctcccagcaggaagtttgtttgtttgtttgtttgttttagacggagtcttgctctgtcgcccaggctggagtgcagtggcacgatctcggctcactgcaagctgcgcctcccgagttcacgccattctcctgcctcagcctgccaagtagctaggactacaagcgcccgccaccacgcccggctaattttttgtattttttagtagagacggggtttcactgtgttggccaggatggtcttgatctcctgaccttgtgatccacccggctcggcctcccaaagtgctgggattacaggcgtgagccaccgcgcccaaccagaagtttgtgtttgatgtcactgttgtttcaccaatttaaaagaaaatgaatatttttaaaggaaaagaaaaaagttatcacactatgtgatgaaatttgtatctatgggtggttatttgctacttggtaaataattaaagcctgtactggttacctttcctttagcagctgacaacaaataaacatcctcacctcacaccttatacactttactccatggttcattttcagtattattttgtacttctcttgcttcatcatactattgcctggcaaaattccaacccagatttaatcctgctttccatctataccctgcctacacctgagagttcaatgttactgtggaaaatgcacactgtggtgacttgtttcactttaaatgcatgggccctaacctcactgagccatttattagtaatgattggcaactctccatatttcttgaatccactcactttcctagtctcctggacaactatgtgacaactcctctatcctcaagcctccaacaattacttctcataccctaactctgcgcagataaccttttttcctatttcactgcaaaaagcccagaagtaatcaaaagtgaatctacaagcttccaccaccacatctactcctcccagtctcagtgaccatatggtttgccttccttctgttaacagagagcttctatcaaagatgaacctctccacttggcactttatttccctcttgcatattcaaggacattagctcagcaattttctttctttctcctttcttgcattatttattttctccctccaccagaagttgtcaccccaacttctattagaatgacttaggaagtgcaggcctcaaaccttttttttttttttttacacgtctacctctattagcactccctgctcctattttaggaatccaggctttaacgctaacagttacaaattaagccacaagctttgtaagtatttgcctgtgctctagctgctagtgggtttttggaaaatcagtatctgatgggcatttgaatacatttgctcttgtggctttaaacaatgtctgtacaataaaaacttgagaatttatctcctctgaattctagacatttctattcaactacctagctggcatttccacttgcatgccttaaaggccctcaatcttatctgtactgaatcgatcacccccctaactgcctcatccgtcagttatccccattgcagttggtgacattccatcctttggttgcttgggttaaaaaatgttggagtcccccttgactcctttctttctctcatttcccaaagccaattctttggcaaatagtaaccatttatcacattttccactgctactgttctggtccaagccaccatcctcattcacttggattattgcaaagacctttacctgttctatatgcttttatatttgctcatttttctcccttcacccctattttgctttcagcacagtatatcatctcatgcatctactcaaagccttctaatgccttcccatttcatgatggcctataaagccctttgtgatctggttccctgaaatccttgacttcatttgggcagatgtttctgctataacgctatttatgtgttctgtaaaactttttggtctgcaagatgtactttgaaaaataacaggtcttatggtaaaattacgattggaatagaacactcatatcttatacaacataaaaaactgtagcaataaccaaagcaataatagataccttgggagataacaggaaggcaggcagctcagattgactgaaggcgactcaaggaatattaaaaatgcacaaaaacagtagcatggagatgccggctggggagctgagatgagacagatgaatggagctctgagccagagggcctaccacaaaagtggtcataggaagaagttcagcctgccttgagcagatagctttgcctggtgggagagggcgtatttcttgggagacacctctgggtgcaggcgctcatctttaattcccttaagagagctgaaatcactgcagtctgtgcagcagccaacttcagggatttttcctttcctgctaaggttataattctgttcttgctattcttactcctcttgcctaagaaaaatcttgtttccatgtaataccaatattatcccactatttaccagtagcatatgagctgcttgctgttacagaaacacatgctgtaatagaacagactgcactccttgggtcatctttgttatttcccatgtgtcaggtgagcacccaccttgtgacttttgctactggtctttccctgcctggaatgctttccctccagaagtcctcacggatttcttcttctatttcagttctttatttaaaaatatttttcatagtttgaacctctctaaccagctgatttaaaagaacaacaccaccccaacaacgttctctactttacatcatagtttaattttctccatagtatttatcatcatctgatatattataatactcatgtattggctgaaccacatccataagtattaagatccgtgagggcaagacttgtgggtttttaaacttgttttcctcctttgtttttctctattatatctttagtgtctggaataaggttcagcacatacaaggcatttactaaatgttgaatgaatgaatgaatgaagctcaagctccatctacaaacagtcctctgttttttgttttttgtttgtttgtttgttttttgtttttgttagctgttatctggctgttttttattagataataatttgtcttcctttacttactgattttgtttatgtgtttgcaggtgtgtgtgtgtgtgtttgtgtgaaagaggagaatgacttttatcaaacctggttttatgtcttccttaggatgcatcagagtttcatgctgttcacactacccttcggggtattcagacatttaaagtcttaatatttcagcaataaagtcttaatatttctggcctggaaaaatactgtgatatgggttgaattcatctttttgcacccctctatcatcataaccactccctgctcccattctaggaatccaagctcttatgctaacaattaaaaattaagtccacagactgcagatagaccctacgcttgagctgccggtgggttgctgaaaaattaatatttgatggaaatttgaattaattgcctctttaccccctaccaatccctgtgtatggtcaaaaaataggacattccaatactccacagtgatggccacagtgctggtttgtgctgatgttataaaggagcaggaagatggtaatgaactccctctggtgctggacaaggcttcacaagggtgctgatgaaaacaatgtgagaaaatggactcaggggttctcaaggcagagaatggtggggggatccaggaatccacatattcaaagacacaaagaagtacagatttctgaggtgttcagggaatggtgattcattaggtatggggctgggggtggggcacagggtaggcagaggagagagcagtaggtgtatatgccatgaagattttggaatcgatccaactatacagctatcaaaggtttttggtgatacaaccagattcgtcttctcactccttacctttctcacctgatccctccctggcttttccaaactgtcaactataaggctgtgtgaccagagagcatgcccctgtccccagtactcagataagtgcctgacatatatatatatacatagacaacctacttgtttatgtgtctgaacaaactatcaatattcatttctgcattttcttttcagcaatgcttacactgtcttcaaatcctttagggccctacacttgactatcaggctgcctattgaaaactaactttacaggttgttcattggttaccatgatggcacaagtaaccattcagtaactttttttttttttttaactagaattgaaagctttgatccattctctttttctggtctcatttcccttctaccagatctgattcatggtgcaacttttggtggcatcaccccttaatccagcaacatttttgtataccctgaggttattactttgatgtcctgaacttatggctctgggggatatttttttaaaggggtcagagaaataaggttgaattagagagattcttagaagtttatgattaaaacactatcccctctgatctgagtcccagctctgccattgacaggttgtgtatcattagcaatagcaagctacttcacatttctgaatctcagttgattgagcaaaatttagataatcaaagactactggagatgtgatgctttgacacaaagaaatctacctctttggtgaaatttcaattgtgtaggagcagttatttgggagaaaagtgccctctcaccttcttaaatcatctcctagggctataataggaaatacgcagcttttgctgagaacccaaatgacattgtggattatccagctctagtcttctctctcccatatagaggccggttatctttgtcacttcacagctcattagcagccccactcagggccatggagaggaaatagatgagatgaagcttaaatatgtcacattggttatttcttagcagctctgataaaaggcttagcaggggccaggcgcggtactgtacgtctgtaatcccagcactttgggaggccgaggtgggccgatcacctgaggagttccagcccagcctgaccaacatggagaaaccttgtcgctactgaaaatacaaaattagccaggcgtggtggtgcatgcctgtaatcccagctactcgggatgctgaggcaggagaatcgcttgaactcgggaggcggaggttgtggtgagccaagatcgcgccattgcactccagtctgggcaacaaaagcaaaactccgtctcaaaaaaaaaaagcttcagcagggtgaggttaaaactcaaataaagaggtctgaggattatctgtgatgttagctcatgtgtgttaccttcctgtcttcccttctttgttcttatttctagggattagttgactgcaaacattaatgggttaaatataaaaatgactgcaaacattaatgggttaaatataaaaaatcttttctatcctgaaggtctttgaaaaaatgattttattacttactggaaaagaaaaataaaacaaagcttgcttcacccagaatttattttttcttctagttaaaatgagcaacttctttaaccagaactgaccttgaagacaaatggctaaaataaaacatttgctgaattcactgggcgcatcttacaagtaatttttggattctgcattgactacctacaagtgccttctgggtgcaagtccacaggcaagatttgttctgcaaatcttccatgaccaaggtcacctctttggattggcagacccagggagtccatattgggaagataaattcacacttcaccccttgttgagatctccagccttgctcctctgataaccaggtctctcttctgtcctattataatttatgacctttgaaaagttacttatatctggggctattcaaactcccagctatctatgaccatatgcataaatggttctagatttaaaaaaaaaaagaagctattcagagatattgggataccctataaccaatataaatgggtaattcagcagaaccagatgctggggttgagaaatagatgtggacaattggggcagggcctaagaaagatcggaggcaaagacagtgactagatggggagctctgataaggtaatgcccaggcctgtgcttggaattctgccacagtggggacattagtgggggtctgtagtcattgcagggtgagaggaggatagaaagaaaagattgtgtgaaggtcagtggaaggtcccccatttcattgctaagagaactatgtatgcacgttttcctgtgtttagtctcacacataattgtacctttaagaactgatcacacactgcatttccctggcagtttttggcatctcagatgaggaagagtgatgggcgacaggtgatggtgacaactattaataagatctgaaagtaaacagtctcatgaaaggtggccaggagagggcagtcaccttttatcaggagcacagactgaatttgcaaagggtacttaagctacaagactataaagcatgatgcaggcttaaccaaaatgcagtgtcttgagcatagtagactcttagtgtatgtttgctaaatataccttagctgctgctgttccccagagctcatcagagttccatagaaacctggtcccttccagaaaaccaaagaatgactaaagaaaagtgattgcaaatccagaaagcagctttgccttactggttggtaacagcaggattttcttttccttgtagtttattttggcttaggctagtgtctctttcatgaagacagctactatttacaattgttgttaacatgtttttcctttttcatctcccaatatactctcttcctgtcgttaaacacagtcaatttaccaatggaatctgctttataagctcctgcattttctttttccacagatgggattaatgccattatgttctatgtcatccacatagtcttggcttctaggcaccaaggtgttgttctagaggaaagaagagtaatggtcgacacaggcaggctgagggctaacctaatgatttcatgcatttagtggtaattcttaattaagatcccaattttattctgttggatttagtctataacccgctgaaaatcattcttgaattaacactgggtggatataaaagcagaaagccaaggactttgcactgttctcagctgtagctgtttatttagctggagaaaatttagtgggtggtccaaccttcataaccaggaagaataaaatagaggtgtaaaggccttggtggaaggagggcagtagcaacctttccatttcttcagttttatcgcagcctatgaaattagttccttaggtatgttgatcttgtaggagctagtattttaacatttgctccatcaagttgtttggtttaaatctaagaataagcccactgaaaactattcctaatttgtgaaacgaataacaataatagatgttaatagaaacaaagacttcatttggttagtttttagagggggcacagagaatgtagtaacataataagttagatttttgttgttttctttttcttagttctttgtagtctttataatctctaattggcatttgctcctgacttttctcagtgtacttccacatggaagagacaaaagtctcaaagctggtgtagaaaaacccttaataaattgcccattaattagccaccttgatttccacctttaaagcagttaattgaagtaagaatttgttagatttttctcaagcatagcagaaattaagattaatttcttaggtgtcattgctacttgcctacttaaaccaccagttcatctttatcataaatacttaagccaaaagtcacattagaggcaatatggcacagtgattgtggaccccggagtcaggtgagctggttgaaatcctggcttggctacttcccagctatgtgatcctgggcttcagggttcccttttgcaacatgacatgattgctgagctgcttcttagggttgtgtgtggctccggtaagataatacaggaaaagagctgaaagcagtatctgaccctggagagaaagtagggaagagacaatagaggaaagaggacaaggaagtgggagatgaagagaaagttcaagaaggaaagtggaagaatctcaaatagaaagttaattttcagtttttcctgagaagagatatatagacatcttcatgtggctttggagagccttggagcccatcagcaagacggttggaaattatactgaaacagaagtgtagacctatgtgacttatgtcctggccagttgcctcatgtcctctgtggtcaggttgatctctactggcactgtcaaaagattttttatggacagctggttggggtaaactttgaaacctgattgtttgcacttgagtgccagagtgtgtaattatttaccggtgttcactaaggatgtcagtgtagatttttagggggagaaaaaacttaaatttaaaatttggaggcatctttttcagtctgcctgccctggtgtttgttataacacttagtttggcatgtaacagctgaagctactggttaaatcattaagcatttattattttaaaactcctcttctcaaagcaaaaaataactatcatgttgaagttctttcctctaagaatgacatttactgtgagttttataccaatggactaattggagggttgagaaaataaattttggaaagacaacaataacttcagaattttccttggatggaggtttcctttttaaaacctgaactgagctttatcaaaacagtaactgaactttgaaacgaaacaagagtgctgaattgaaagctccaggaaggcagggatgtgtctgtgttgtttatgactataacctctgggcctaaatcagtacctatcccatggtaggcactcggtaaatactgaaggaatgagtacagtatgaaaattagcatggctgatccttggaaaaaatataagtcaaaagggaatagcatgcatgtgtaactaaaacatcagtccacatgcttgaaatgtcatcacttttttatggtcaggacctgtttttttctgctccaattaaagaagaaaattgtaatgtgaaagaagcaagaagtgaagtatttggtattcatgtgttttgacatctgcagtaagtttaaaataaatttctaaatcttattgtattgaaattgtatgagtttcttaagtggtattattcattcagacttaaagtgaagttaggttgctgtcactcatagtggacttttttttttttggcattattaaaacaacatgtcttctgggtgttgtcttgtattacaaaagcttgcgtgttttctcttgatgctgtgccctgtctgttgccattgaggggtctaaggaccaaatgaggtcttgtttccttcctgatattcttttgaccagtttagaatatgccaggtccattcacacaactaagcggctcagttctctcagttccctggtcttctcatattagattgttatctatgagcttgaagtttagacatgaaaaagaatggttgtaatcctcttccttctctcaccctcttccctttttttcttaagttagccttttgaattcatgattctaataattaatatatattattatataatatagtatatattcataataatgattaatgatagtattaataattctgtgtgtgtgtgggcagctactcatacagaggaaaacagattgattagtggaaattacattaatttcataacttcttattaaaagagtttgtgtgtgtgttgttggttgtttgttccctttgcaactcaacatggtcttcttgaggtgtagggaaaacatatgcttaggaaacagagccttcttttctccttttggtatggaagacatatgcaaaaagaatgaaggaactaattgtctctagccagggctctgcaaaaatagtactggtagagaaaaagctctaaaagaagtaaaagtttatagtgctttctcctggcagagttaacctcatcttcatcagcttttcccctgcctcagagaggcagttttggaatgaccaaagcagagtgcccaacctctctgttcagagttagcgagcatttggatcactctctctctctgcctcagtatgagtggaatattgcatgaccatttctgatttctgccatgagcgcactcggcctagatgaataaatcctccttgaagaaggcggggcattttggcattcacaagaaaccatgttgatatctgatcctcccactggagaaatgtggcaaagtgagaaagactcactctttgggactccaaaaatgtaaacacaagtaagcatgcaagctgaagaagtcacttgaaatagaaaaaaaaagtgttaaactctctgttagtcatgtgactttttcttggtattcgagagccaggaggctcttgtggtctaatctggaaagagtcgctaatcgctgtgtcaccttggcaaattggttgatctccctgtgctggagtgtttagtccagctgctggatgggatgaaagcaagacctcactgaaaccagatgctgtctctctgaaaagatttcagcaataaataatatcgtatatactttgttcctggcagcaaatactgaactgctataaccctctgttttcacttgcttctaaatttctggaaatatctcctttgggcttgaatttttccatgcttgtcttcagcccaaaactttttggaaagtttgaccaaaatttcacttagctgtttttcctgaattatgggagaataagggcaatgcattgtttttcagctcataaattctcatttttcccattattcctcagaaaaatagctgctacatttaaagtgtttagaactagtaaaagaatcttggtatggtaaagaatactggcagaagacaaatttaagtctctcagtatttccttctaactttaaacatgactgcacacaatcagggcacacataaaaagctctgatgtagttttatagatggccaaagagaagattctgcaaattctctcagtaactcatcccaagttaccaagaggcaactttagctaccatcagttgttacctttctcaaccacttgctctgtctgtggatctgatttctaaaaaaatgtcatggttatatgttggcattgaccccttatctacattttaaataaagttgaccatttcttttaggtagccttcatgtgtgatgacctcagtcatatctgctgacctactagactcaaaattcctttacagcagggcctaggtctgtctacctcaccattgacactgtagtgctcagcagggtatgacacatgtagtaaaaactgattgttgaatgaattaaatgaccataagtacagttgtttttgctgcaatttgttcattgatttgtccactaagacatgcatgcatgtattcagtgagtatcactgagtctctactttatgccaggtattggtatgaatgttgtgaatatttctttgctttgatggataacacagaagttttgctgatacacaacaaaataattatattatttgagtacaattactatgcctatagttggaatattagtccaatatagctaaaggcaatcccagggaatttatcacttactgagcgtccatgatgtgcctggccctgtgttaggtactgagaagagatcaattagacagtttctgcaggaagtcacacataggttaacagtgccaagacaaatcctaaagtacctattatacaaggggaactataataaagagccaggtgagttgaaggcaggagaggtatcattgtaccacaagataccttgtgatcttgtgtaaatcccctgaacaatcaggaaaagctttatggcatagctttatggtcagagatctcatggggacaggcagttagttgcaatgccttttatagccacatccttcactccttaaccctgcactgtctgccattcattctctctgtgctttcagccttgagaagctggccaaatttctcaggactggaaaataaactggaatgacactcaggcacttgatatcaagattattagggtcatgattgtgtttaagaccctaagacctcttgatgcttttacaagaatgggtactttttttgtccctgttttcttcttttgccccaagtttcaagagcatgttacagcagcagtataagcatacacaatcaaaggtgattgaagtgaggacaactggctcaatgagctccagccacttcaactctcctcctagtccctgtccccttgcccggaatgcttcaccctcagactttgacatagcaggcttctttttgtcattcagatctcagctcaactgcaaggatttctctgacctgaagttacatatgtgtcaccccttctggtctccgttgctctctatcacatcacctattggactacctttatagcatttatctccacctgattgtgtccttttcactgtttttctttaaactttttattgtcaattttctttcactagatgccagttccatgaagtaggaaacctttaccactggtcttgagtgctcttgaaagtgtacgtgtgcaataggcactcaaaaatgtttatggaatgatcagctggatgcgtatatggcaagtggcgagaagccaagggaataggacaagagtcctattgtgctccttgcctgaagaaaacctcttgcaagaatcataggctgttcttgagggtgcctttgccttggattcgccaaaaattcttctgtttcttttgtgtgaaaattttcccctcatacacagcaatgggcactaagaatgcatatatccagacttttcaggttacaggatggcatctcagatatagtcttcctttgatctatatactatgaagccataattgcttagccagtatctttttcaggatttactccatatttcttattctaggcctttcaggtggcagctgcactggctttcagatataatttagaatttagtttcggatttgtaaagctactcatgctgcagatcttctctgaaacatttctgtcacattttagaaagctttacattttcatctgctaacgattttcatctgccaaagagcccatctacttaaaaagcagatcactgaagccacacttggcacatattactttggcttattttcttttgatttttttgctttgctgggattacttatttatgaagaaagagagaatattgacttcttattttagaagagaggatattacttgggttgagagttctagttatataaaatgtatttatctaagttgttaactatatcaaaaatggagcagtcaatctttggaaatagttcagggtgaaatgtttttagcatgttcacatattctctttgctgtttttaaataatttggcaaagcttatttgcatttcccaaattaacaattttggccaagaggaaaagctaaagtgttggtttttctcagctcaactttttgggtgtaattaatttataagcaagattttatgaagggagaacagataggacctttctacaaagtccctgagccaaaataaacaccccattgttccatcgttttgtattgcacataggaaaacatccatccctatcattattctgttaaagggacacagattaccagatttgtaattttaaaaaaggccatttgttgattgagccactttgcgtataaagggtggtatatgttgcctgccgaatttctgtacaagaaaaaaatcatatatcaaaaaaatttttctcattcatcatataagaaatttatgcattttagtatgtaccagaagaaatggctttggcattttctgtttttagcagtctgttgaaatttcttcattaaagacattttctgtttgaaggttaaaatgaccatataaatacagattaattcagttttaataggtgcatcttcctgtcatttaccactttctctcctcaatatcagctacagtgatcaacatatatttagcagtgaaactgatatattctgtttatcttcaaatcataagctttttgtttaaatacaaaggaaaatcttatacctctgattttaatatgacaaatcaaaaagtccacaccaaactcccaactcatcccaaaaaagagattgctatctactcatcactgttctctgcttctaagatttgtttcccttggggttactgtttgagcaacttttcttacttccaagattgtttttgtggttttaagaaagaatctgaattccaagattatttttctggttttaagaaagagtctgaaaatctagagattacttaccttgtggtgaggtggttgtctatgcttctgttcaacaaaggcctcatgtactgaatggaaaaaaagcatcaggacctataattttctaggcattatgcaagataatagaggagacaaaaatgatgtcttgcttcaaagtcttagatctatttccctttgggggttgaggaatgagaaagagatttttagatgaaaaacaggaagcccaatgaggacgtgtggcaatagttcctaaaatgagcaaagagataaatttactcttttatatgattacaaccaaatcacacactggtgagtttcaaaacagtagttttcatttagaaagcaaattaagtggaataattcaactgagtttcactgcaatgggattcattctagatggttcaactctggaattagaaacaatatctaaggatgttgctgatagtagtcagcagataaataccagtaagtcgtatacaggtatacatcattttattgtgatttgctttattgtgttttgtagataattgtgtttttacaaattgaaggtttgttgcaaccctgtaacgagcaagtcttctggctccatttttccaatgacttgtgctcattttgagtctctgtgttacatattggtaatccttgcaatgtttcaaacttttttattattattatatctgttttggtgatctgtgatgagtgacgtttgatgctattattatgttgttttggcacaccatgaattgcacccatataaggtggggaacttaatcactaaatgttgtgtgtgttctgactgcttcactgaatggctcttcccctatctctctccctctcctctggcttccctattccctgaaacacaacaatattgaaattaggagcgttaataatgctacaatgacctctacgtgtctgatatggtttggttgtgtccccaaccaaatctcaacttgaattgtatttcccagaatttccatgtgttatgggaggcacccagggggtggtaattgaatcatgggagccagtctttcccatgctattctcatgattgtgagtaagtctcactagatctgatgggtttatcaggggtttccacttttgcttcttcctcatttttctcttgccaccaccatgtaaaaagggccttttgcccccagccatgattctgaggcctcccaaggcatgtggaactgtaagtcccattaaagctatttttgttcccagtttctggtacgtctttatctgcagcatgaaaacaaactaatacagtaaattggtaccagtagagtggggtattgctgaaaagatacccaaaaatgtggaagtgactttggaactgggtaactggcagagtttggaagagtttggagggctcagaagaagacaggaaaatgtgggaaagtttggaacttcctagggacttattgaataactttgacccaacagcctgataacgatatggacaataaagtccaggctgaggtggtttcagatggagatgaggaacttgttgggaactggagaaaatatgactcttgttatgttttagcaaaaagactggcagcattttgccctagagattcatggaactttgaaagtgagagatgatttagggtaactggcagaagaaatttctaaacaacaaagcattcaagaggtgaatgcttgggtgccattaaaagcatttcattgtgaaagggaaacagagcataaaagttcagaaaatttgcagcatgacaatgcagtagaaaaggaaaacccattttttgaggagaaattcaagccggctgcagaaatttgcatgagtagcaaggagcctaatgttaatcccctagaccatggggaaaatgtctccaggccatgtcggagaccttcatggcagacctcccatcacagacccagaggcccaggaggaaaaattgtttttctgggccaggcccagggtccctgtgctgtatgcagcctaaggacttggtgctctatgtcccacctgctccagctgtggctgaaaagggccaacacagagctcaggctgtggcttcagagggtggaagccccaagccttggcagcttccatatggtattgagcctgtgggtgcacaaaagtcaagaactgaggtttgggaacctccgcctagatttcggaagatgtacggaaatgcctggatgcccaggcaaaagtttgctgcagagttggggccctcatggagaacctgtgctagggcagtgcagaaaggaaatgtggggtcagagcccccacacagagtccctgctggggcactgcctagtgaagctgtgagaagagggccactgtcctccagaccccagaatggtagatccaccaacagcttgcactgtgctgctggaaaagccgcagtcactcaatgccagcccatgaaagcagacaggagggagactgtactctgcaaagcctcagagtagagccgcccaagaccatgggaacccacctcttccatcagcgtgacctggatgtgagacatggagtcaaaggagatcatttttgagctttaaagtttgactgccctgcggcatttcagacttgcatggaccctgtaatcctaatcctattgttttgtccaatttcttccatttggaacagctgtatttacccaatacctgttgtatctaggaagtaactagcttgcttctgattttacaggcttataggcagaaaagatttgccttgtctaaggtaagactttggactgtggacttttgggttaatgctgaaatgaattaagactttgggggactgctgagaaggcattattggttttaaaatgtgaagacatgagatttggaggggccagggccagaatgatatggtttggctgtgtccccacccaaatctcaccttgaattgtatctcccagaattcccacaggttgtgggagggacccagggggaggtaattgaatcatgggggccagtctttcctgtgctgttctcatgatagtgcataagtctcctgagatctgaggggtttatcagaggtttctgctttcgcttcttcctcatttttctcttgccgccaccatgtaagaagagtcttttgcctcctgccatgatttggagggctcccatacatgtggaactgtaagtccaattaaacctctttttgtttccagtttcagatatgtctttatcagcagcatgaaaacaaactaatacagtgtccaagggaaaggaaaagtcacatgtctctcactttaaattaattaagcttagtgaggaaggcatgttgaaagccaatataggctaaaagctaggcctcttgcaccaaagagttatccaagttgtgaatgcaaaggaaaagttattgaaggaaattaaaagtctactccagtgaatacataagttattaaaaaaaaaaaagtgacacagccttagtgctgatatggagaaagtttgagtggtctggatagaaaatcaaaccagccacaacattttcttaagccaaagcctaatccagagcaaggccctgactctcttcagttttatgtaagctgagagagaaagctacagaagaaatgttggaagctagcagaggttggaaatttaagaagccatctgtgtaataacataaaagtacaagatgaaccagcaggtgctaatttagaaggtgcagaaagttatccagaagatatagctaagatcagtgatgaagattactaaacaacagattttcagtatagataaaatagccttctattggaagaatacgtcaatagaagatctaagactttcatagttagaaagaaaaagtcaatgctgggctttaagacttcaaaacttcaaagggaaggctgatcctttttttatgagttgatgaagttggtgactttaagttgaagccattctccccagccttgctagagaaaccaaaagtcaaattcaggaaatacagagaacccctgcaagattctacacaagaagatcataccccagacacataatcatcagattttccaaggtcaaaataaaagaaagaatgttaaaatcagctagagagcaagggcaggtcacctacaaaaggaaccccatcgggccaacaacagacctctcagctaaaaccctataagccagaagagattgggggcctatattcaacattcttaaagaaacaaatcttcaaccaagaatttcatatccagctgaactaagtttcctatgtgaaggagaaagaagattcagagaagcaaatgttgtgggagtttgttagtaccagacctcccttataagagatcttgaaaggagcactaaatatagaaaggaaagacagctaccatctaatactaaaacacacttaaatacacagaccagtgacactataaagcaaccacaaaagcaagccagcataaccagctaacaacacaatgacactatcaagttcacacatatcaatactaaccctgaatgtaaatgggctaaatgcctcacttaaaaggcacagagtggcaagctggataaaaaagaaagacccaatggtatcctgtcttcaatagacccatctcacatagcctcaaaataaaggggtggaggaaaatctaccaggcaaatggaaaacaggaaaaagcaggggttgcaatcctaatttcagacaaacagactttaaaccaacaaagatcaaaaaagacaaagaagggcattacataatggtaaacggttcaattcaacaagaagacctaactaccctaaatgtatatgtacccaacacaagagcactgtattcataaggcaaggtcttagatacctacaaagagacatagactccctcacaatattagtgggagacttcaacactccactgacagtattagatcatcaaggcagaaaattaacaaagacatttaggacctgaactcaacattggactaaatggatctgatagacctttacagaactctccacctaaaaataacaaaatatacattcttctcatcaccacgtggcacatactctaagattgatcacataattggaaacaaaacaatcctcagcaaatgcaaaagagctgaaatcatacaatttcaaaaatcagagggcccttaagaattatgctaaatctactctgtctatactctataaatggaacacaatacatgtgtaatagtacacctgtttacagtatggcttgctgaatattttaaggccacagttgagacctcctgcacagaaaaaaaagatttttttctaaatattagtcctcattgagaaagcacccagtgaccaaagggctctgatggagatgtacaaggaggttaatgtagttttcgtgcctgttaacacaatgtccattctgcagcctatgtatcaaggagtaattttggcctttaagtcttattatttaagaaatacatcttgtaaggctatagttgccatagatagtcattcttctgatggatctaagaaaaatacattaaaaaccttatggaaaggatttaccatcctagataccattaaaaacatttatgattcataggaggaggtcaaaatatcaaccttaacagcagtttagaagaagttgattccaattctcatagattactttgaattgattcaagacttcagtggagaaagccgctgcaagtgtagtggaaatagcaagaaaacttgaattagaagtggagcctgaagatgtgactgaattgctacagtctcatgataaaacttgaacagatgaggaatcacttcttatggatgaacaaaaaaatagtttcttgagatggaatctactcctggtgaagatgccatgaacactgttgaaatggcaaaagatttagaatatgacataaacttagttgataaagcagcagccagatttgagaagattgactccaattttaaaagaagttctgtgggtaaaatgctgtcaaggagtatcacatgctacacagaaatcttttatgaaaggaagaatcaatcagtgtgtcaaactttactgttgccttattttaagaaattatcacagccaccccagacttcagcaaccaccaccatgatcactcagaaggtgtcaacattgagacaagactctccaccggcaaaaagattatgactcactaaaggctcagatgatgattagcatttttagcaataaagtatttttaaattaaagtatatacattgtgctctttttagacataatgctcttgcacacttactagactacaacagattatacacgtaacttttttttttttttttgagacagagtcttgctctgtagcccagtctggtgtgcagtggtgcaatcttggctcactgcaagctctgcctcccgggttcacgccattctcctgcctcagcctcccgagtagctggaactacaggtgcccaccacaatgcccagctaattttttgtattttcagtagaaacggggtttcaccatattagccaggatggtcttcatctcctgaccacgtgatccaccctcctcagcatcccaaagtgctggtattacaggtgtgagccaccgcgcctggccagacataacttttatatacagtaggaaaccaaaaaattgtgtggcttgctttattgagatatttgcttcattgcagtggtccggaactgaactgcagtatcttcaaggtatgtctgtattcaagtttatattttgacatacattcttctttacttgttaaaatcatggtcacctcattattatatgactgatcagaatttgcagggttgctttgaccatataccattgttctacaactacgcagatgtctgagtcctaaaggtgaatctgtctggccagttctgggtttaacggcctatataaaaagtagatgttacacaccttgtataactgaagcgccctatcacggacacagcttaactcttgggtgggtcacttagtctgcttggttgaggtttcagtgcttttcacatctacagaaatgtcctatttgtctaaggcaattttatgaagtaaatttactcttgtcatcctttccaacctgaaaatagaggatatataatttttagcattccattattacctaggggatggtcttcagtcattcttccctgaatttattacactggccctatcttcttcacctgaaataagttaaatgtagaattagcactaaagagaaatagaatgaacttcttccggaatgggaataggaaatgaaagagagtaaatcagaagtgaatcacttcttttttttttttttttttttttttgctttgcaaatctatatttttttccagctttatttaggtatgatcagcaaataaaagttgtatatattcaaggtgtatgacatgatgatttgatatatgtgtacattttataatgatcaccatgatcaaattaattaacacatccttcaccacacagttaccatttgtgtgtgtgtgtgcaagaggaggtaagggagtttaatcatttttgaacactagctacaacataattcaattaaaattctgagaaagaagaaaaattgtcatgcagctgtttaattttagaagcattaactgacaaaatccaagtcttatgatgaatactcagtcaaattttcatgaatgaatgggagcctttacctctgaaattgttgtcatggaagaaaacactaacactgtcttacacagtaattcaagttaccaattgagttaaagtagcaagatgagccatggttgtaattgagaatggcaactatggtgttcttatctaatctgctacctagtttgcctttttgctctaaaatggtgactatgttagaattcaaagaataaaaggcctttatcctttcaggggaaatacaagtaacaagcttaattttttttttcttaacactgatgaaactcatttggggctgtggaaattgctgctagcattgaacctcttattaacattcaaggtgtgccagttttgcacaagctgtgtcatattcagagatagattgttggcacaaactaaggcacttattctcttgttttttcacttctttcaataagaacagataaatatactatttctagataagcagttgaaactgttctgctcatctctttggaataggtttgtgggggtatcactgtatgacatgccgaagaaatatacaagggaaatgctcccgcatacattgagatataaatgaatgcctattttagaatacgtcatttcttaaaagtaaaataagttttggctgggcgcagtggctcacgcctgtaatcccagcactttggaggccaaggtgggtggatcacctgaggtcaagagttcaagactagcctcgccaaaacagtgaaaccccatctctactaaaaatacaaaaattagccagacatggtggtgtgcgcctgtaatcccagctactcagaggatgaggcaggagaattgcttgaacccaggtgatggaggttgcagtgagctgagatagcaccattgcactccagcctgggcaacagagtgagagtccatctccaaaaaaaaaaccaaaaagtaaaataagtttttaaagtcactgattctgtttctaaggaattctcagctggggcttctgagtcaattctcgatggttagaacttatgagtagcagaaaaagaaaactactatggattttctctacaatgatttgagacagtgaatggggctttctggcaggttagcagttaggaactcagatgaccatagacttttttttttttagagtgggtctcggtctcactctatcacccaagctggagtgccgtggtgtaatcatagctccctgaagcctcgacctgggctcaagcaatccacagatttttgaagttcaccctggattgttgtgttctacacagaggttccaccttttgctgccttttatggttactatattattattttgatgtttcttaaccagctgaatcacattgtagtatatgaaatatgttttggctcttgttttaatggttatttgctagcagatttcacaatggcccaatgaaacaacccattcattgctatttgttgcaattcatggtgactaaacatgactccatggtacggctcaccaaagtcttggtttatgtgtgacttccaggggagagagattgagaaccatctgttaatcattttgtccctaaactagagtttttcaatggagtacttgggcagttgaattagtatgtttctcgtaggctagtgagaaaaatagctttttttttttttggcattaatcagactgctgacccacatctctgggaatacttgtgacaagatccagcctgacaatatcacatatgatttgcttttcttcttggaagggacacattgtggcttttctctggaatctgtgaagaaaatgctcctgagcctagaaactggaactgagaaagctcttcctgatcatataacaataagtcttgtgagggtcaacccttgagccatgagggcagcttgaaggaacatggggttgagagtcaagtcatcagaacttctgtttatttttctgtgtaatatttagggacttgttatgtttaactctaggcaaaggtatagatttggaggtctttgatatagatgatagatagatagatagatagatagatgaaatatattttagcatacaaaggaggctacaatacacactcatgtacctgtcactccaatgaattcatcaaatgtaaacattttccccaaatctgcttcttagctgttattcgtaaagaaacaaattgtacagaaaaatttgaaggcccccgttttaccttccccagtctcattattttctctgccaccccagagaaaacaactgtcttgcataggtatttatataattctgttttatactttgccacttttactacatatatgaagcatgcttgttacatacatgaacataaaatatacatgttttactgtaagtgtggaatgtattctagaatttgctacttttactacaaatattttattttcagaatttacccttgttattatataaccctagttcattttttaattgccatatattactccatcttatgaaaataccacaatttatttattcccatactaatcagaatttgaattgatacaatttttaattaaaattaataatgctgaaagaaatgttctttttatacatttccctcagggtgcatgtgatagagttcttctcacatatatatcagtgtacttgctgtgtcttaggatatgtacaattgcatgtctattagatatgccaaattgctctgcaaagtactcataccagtttccactcctaccagcaatgaatgagaactttgtttcgcaggtcattgccaacacttgattattatcagatttaattatttgccagttgatggatgtgaattgctctatcactgttttaatattcattactttgattatttataacattaggtatacttttcatagggccatttaaatttcctctcatctgaattgcctatttctcctcttcgttgattcttctattatcttttcttctctttattaatttatagaaatgtatgtgtgatcctaatatgtgtcataatatctatgttcatatttcatatataaatataatgaaatacttgtctctgttatatataggttgaaaagtttgctccctatctgctgattgcattttaattttgttcatggcatcttttaacacacgtgatttttaattttgatatagttaatattttttattactctagattttgagaattgctcaagaaatgactttattttgcatagtcatatgctctaatttttttaatctacttacaatagttttatgttaaatatgtcaacctttgtttcacccggaattttttatatgtatggtataaagcataaatcaattttttttactattgagaatgcttttattatattatatcttattctattctatttttatttttccataagttattggggtacaggtggtatttggttactttagtggtgatttgtgagattctagtgcacccatcacccaagcagtatacactgcaccatatttgttttcttttatccctcatccccctcccacccttcccccaaagtccccaaattccattgtatcattcttatgcctttgcatcctcatagcttagcccccacatatcagtgagaacatatcatgtttggttttccattcctgagttacttcacttagaataatagtctccagtctcatccaagtcactgccattaattcattcctttctatggttgagtagtattccatcatatatatatagtatatgtatgtatatatatgtacgtatgtatatatgtatatatgtaagtatatatgtacgtatgtatatatgtatgtatatatatgtacatatgtatatatgtatgtatatatatgtacatatgtatatatgtatgtatatatgtacatgtgtatatatgtatatatgtatatatgtacatgtgtatatgtgtatatatgtatatatgtacatgtgtatatgtgtatatatgtatatatgtacatgtgtatatgtgtatatatgtatgtatatatgtacatgtgtatatgtgtatatatgtatgtatatatgtacatgtgtatatgtgtatatatgtatgtatatatgtacatgtgtatatgtgtatatatgtatgtatatatgtacatgtgtatatgtgtatatatgtatgtatatatgtacatatgtatatgtgtatatatgtatgtatatatgtacatatgtatatgtgtatatatgtatgtatatatactatagtttctttatccactcgttgattgatgagcatttgggttggttccatgatttttcaattgcaaattgtgctgctataaatgtgtgcaagtatctttttcttataatgacttctttcctctgggtagatacccagtagtgagattgctgaatcaaatcgtagttctacttttagttctttaaggaatctccacgctcttttccatagtggctgtactagtttacattcccaccagcagtgtagaagtgttccctgatcaccgcattcatgccaacatctactgttttattattattttttttattatggccatccttgcaggagcaacatggtatcacattgtggttttgattgcatttcccttatcattagtgatattgagcattttttcacatatttcttggccatttgtatatcttcttttgagaattgccttagcccactttttgatgagattgcttgtttttttattttcttattgatttgtttgagtttgttatagattccagatattagtcctttttcagacgtatagattgtgaagatttttctcctactctgtgggttgcccatttactctgctgactgttccttttgctgtccaaaagctctttagtttaagtcccaactatttatcttttgtttttatttcatttgcttttgcgttcttggtcatgaaatccttgcctaagccaatgtctagaagagtttttccaatgttatcttctagtatttttatagtttcacgttttagatttaagtccttaatccatcctgagtagattttttgtatgaggtaagagatgaggatccagttttattctcgtatatgtgactagccaattatccaagcaccatttgttgaaaaggtgtcctttccccactttatgtttttgtttgctttgtctaaaatcagttagctgtaatatttggatttatttctgggttcaatattctgttccattggtctatgtgcctattttcataccaataccatgctgttttggtgactatggccttagagtatagtttgaaatcaggcagtgtgattcctccagatttgttctttttccttatttcttgctttggatatgcaggctcttttttggttccataagaattttagaattgttttttctaattctgtgaagaatgatggtggtattttgaaggagaaggttttgaatttgtaggttgcttttggcagtgtgatcgttttcacaatattgattctacctatccatgagcatgggatgtgtttccatttgtttggtcatctacgatttctttcagcagtgttttgtagttttccttgtcaaggtctttcaactcttttgttaagtatattcctaagtattttattttttatttttttggcagcaattgtaaaaggggttgagttcttgatttgattctctgcttggtcgctgctggtgtatagaagagctactgatttgtgtacattaatcttgtatctggacatgttgctgaattcttttatcagttctgggaactttctggaggattcttcagggttttcaagttaaatgatcatatcatcagcagacagtgacagtttgacttcctttttaccaatttggatgctctttatttctttctctcatctgattgctctggctaggactcccagtactatgttgaagaggagtggcgagagtgggcatccttgtcctgtcccagtttccagagggaatgctttcaacttttccccattcagtattatgttggttgtgggtttgtcataaatggcttttattacattgaggtatgccccttgtatgccaattttgctgagagttttaatctgaaagggatgctggattttgtcaaatgctttttctgcatcttttgagatgatcatgtgatttttgtttttaattctgtttatgtggtgtatcacatttattgacttgcatatgttaaaccatctctgtgcccctggtatgaaacccacttggtcatggtggattatctttttgatatgttgtcagattcagttagctagtattttgttaaagagtttagcatctatgtttatcaaggatatcggtctgtagttttcttttttggttatgtcctttcctggttttggtattagggtgatgctggcttcatagaatggattagggagggttccctctttctctatcttgtggaatagcatcaaaaggattggtatcaattcttctttgaatgtctggtcaaattctgctgtgaatccatctggtcctgggctttttgtcggtaagcctttaattaccatttccatctcactgcttgctattggtctgttcaggttatctaatttttcctgatttaagctaggagagttgtatttttctaggaatttatccatctcttctaggttttctagtttacgtgcacaaaggtgttcatagtactcttgaatgatcttttatatttcagtggtgtcagttgtagtatcccccattttgtttcttaatgaggttatttggattttctctcttctattcttggttaatcttactaatggtctattgattttatttatcttttaaaataaccagctttttgttttatttatcatttgtattttttcttttaattttatttagttcttctctgttcttggttatgtcctctcttctcctcggtttgggtttggtttgtccttgtttctctagttccttgaggtttgaccttagaaagtcactttgtgttctttcagtctttttgacataggtgttagggctatgaactttcctcttagcactgcctttgctgtatcccaaaggttttgataggttgtgtctttactgttgttcagttcaaagaattttttaacttccatcttgacttcatttttgacccaatactcattcaggagtaacttatttagtttctatgtatttgcatggttttgacggttccttctggagttgatttccaggtttattcaatgtggtctgagagagtacttgatataatttcaattttcttaaatttattgaggcttattttatggcctatcatatggtctattcttggagaaagttccatgcactgttgaatagaatgtgtattctgcagttgttggatgaaatgttctgtatatatttgttaagtccatttgctccaagtacagtttaaatccattgtttctttgttgtctttttgtctggatgacctgtctagtgctgtcagtggaatattgaagtccccactattattgtgttgctgtttctctcatttcttaggtctattagtaattgttttataaatttggaacctccagtgttaggcgcatatatgtttaggattgtgatattttcctgttgcacaaggctttttaccattatatagtgtccctgtttgtctcttttaactgctgttgcttcaaagtttgttttgtctgatacaagaattgctacccctgctggcttttggtgtccatttgcatgaaatgcctttttccacccctttactttaagtttatgtgagttcttatgtgttaggtgagtctcctgaaggcagcagatacttggttggtgagttcttatctattctgctgttctgtatcttttaagtggagcatttagggcatttacattcaatgtcagtatgagatgtgtggtactgttgcattcatcatgctgtttgctgcctgtgtaccttggttttttgtttttggtgtttggtttttaacttgtatttttgtttataagtcctatgtgatttaggctttaaagaggttctgttttaatgtttccaggatttgtttcaagatttagagctccttttagcagctcttgtagtgctggcttggcaggggccaattctctcagcatttgttcgtctgaaaatgactgtatctttccttcatatatgatgcttagcttgctggatagaaaattttggactaataattgttttgtttgaggaggctgaagataggggcccaatcttatctagcttgcagggtttctgatgagaaatctgctgctaatctgatagattttcctttataggttacccagtgcttttgcctcacagctcttagaattctttcttttgtcttaactttagataacctggtaacaatgtgcctaggtgatgatttctttgcgatgaatttcccaggtgttctttgtgcttcttatatttagatatctaggtctctagcaaggctggggaagttttcctcaattattccctcaaatatgttttcccaaacttttagatttctcttcttcctcaggaacaccaattattcttaggtttggtcgtttaacataatcccagacttcttggaacctttgttcatattttcttatttttttctttgtctttgttgaattgggttaattcaaagaccttgtcttcaagttctgcatttctttcttctacttgttcaattttattgctgagactttccagagcgttttgcatttctataagcttgtccaatgtttcctgaagttttgattttttttctttatgctacctatttccttaaatttttctcctttccctgcttgtatcatttcgttgtatcagatttccttgcgttgggcttcacctttctctagtgcctccctgattagcttaataactaacctcctgaattctttctcaggtaaatcagagatttttttcttggtttggatccattgctagtggactagtattacttttggggggtgttaaagagccttgctttgtcatattaccagagtttgttttctggttccttctcatttggaagctctgtcagagggaaggtccagtgctgaaggctgttgttcagattcttttgtcccttaatgtagtactctccctattttcctatggatgtggtttcctgtgagctgagctgaagtgattgttatctctcttctgggtctagccacacaaccagtctacctggctctgagctggtactgagggttgtctccacagagtcctgtgatgtgaaccatctatgggtctctcagccatggataccagcacagtatttggggtgtctcctgcatcctgcaggagcagtccacttccttctgtgggtcctctcgggattcctgtttcattcttgaagtctagatctattttttgacagtctaatcctaacaccatttactgaggaacactctttttttcattgttctgtaatgcctcctctgttgtaaattaagatcccataaatgccttggtatttgctagactttctttttcttctgttgttttaaaattttctctcccaacaagataaaatattgtgtaaatattatatgtttatactaagcatttttatcttgtactgaataatagtgagaatgcttcaaaatttcactgtttttgctattaagtatgatattaagtacgctattaagtactgtataggtttttggctgacttatttttgtcaggttaagaaaactgctctctatttctagtttattaagacagtttatcacaagtattagcctataaataatggtttttctgcacattcgaataatcatttgattcccacttttaaattattaatgctgtagattatattgatagatctgcctgatattaaactatccttgcattcttgatctaaatcttacttgaatgggatgtgttactgtattctctctctctctctctctctctctctctctctctctgtatctctcttcctctcttcatctctcttctgcaacatcttaaagcatattttggtaaatttgctttttatagttattgattttcagaaatatttctttgagaagctaaaaatgcaaaggttttatttcaccttgtttcaaatatagtaattatctaggaataagaattgtccattttctacctattgagaatcaaaacattcacagaacataaacctacttgtttcaaatatggtagttatctaggaataaggattgtccattttctacatattgagaaaaaaacattcaaagaacataagcctaaaacctctctttcttttgtttctaacctacgggaagcctgtcacttttctaaaagttatgatcaggctgagcttcactcccccttcctgggctctctggtagaatatgccctcccaagtcctccctagtgtgagtccgcccctgtccccacccatcccctctatccaccaccgcccccgctctcaggctgccctgcagttgtttcttaatgcagcagaaggctgcaacaaccacaaactacattgcccatgatcaacccatgcccatgtccttctgcaccccccagtcagactacccactcccacaacaaccaatatcagtgttcccatatttcatgcattatctatccttctctcaaataaagcagatctagcacattttaattatcctttgtgacagtctctagtattttccttgtttttttttttttgtctagaatttactttcatcttctgattcacaggaaatttgttccatattgtttttttacaagcaatatctagttgaattacccaccatgttttacttttttcctcaccattagttcattcacctaataaattcttattgcatgccttgtgttttcctgctattgtacatgcctggaaatataggagtcaaccaaatcgtctctgagctcatgtagttgacaatctagttagagaacagagatgataaacaagtaaatatatatcaaaaataattgccatggagaaaaattaagtagtataaggattattatttatctaggttgtcaggcaagagcttacagatgggtgacatttgaatgcatacttgaaagaagtctgggagaaaagtatcccaggtagagggaatagcatatactatttgggatcttcaaggaacatcaaagaggccagtttgttggagcaggatgagcaagaagaacgtagtggtaaatggaggcagagatagtgggtgagagtggggttgggaaaaaatcagataggactttcagaccactgtaaatacttggtcatttactctaagtgagataggataccatgacagtgtcctggaaaaaaaaaagggacatgttcttattttagtgagaccaatttgggtgttgggaataaggagattcaaaagcaaaagcaggtaggccattaagaaactgttataataatccagataaatgttggtgccttggttaagggagataaagatggagatggtaagaagtgatcgcattctggatgtaatttgaaggcatgtctgagaggattagttgatggagtgttacttatggggtatcagtgaaagaatagaggaaaggcctgagaatctggaaagatgaaggtgatatttactgaaatggcctacactcttgaatgaatagattaggaagtaaaattgaaagtctggttatgggttttataagtttgagacgcctataaaacattcaaagaaattattaaatagtgaactggatatatgagcctgtagttcaagaaagaggtctggattaaagttatgatttggacaacatcatcatatatgtggcattagtgtcatgattccaaatgagataatccagggaataactatagagaaaagaggagaggaggataatttctggtgatatttcaatgctaagtggttgggaaaatgaagagaacacagtgaagttgaccaggatgaagtacttactgaggtggaagaatcaatggagaagggtgttcaagatacaaaattaagacagtgtgtcagagaagtggggagtgatccattgtggcaagtgttattcattggttaaataagatgattaagaatttgccacaatgtggaagtcattggtgactagagcaaaagctattccattgatgtagtggagattaaagcctgatttcaataagtttaagaaattgggcaaggaggaattaaagaaaggagaataagacaatttcttcaagaagttttgatttagaggggagcagagaaatgggtcagtaacttcatgagcagtaactgaaataggagaaattatcctttttctaaaaggagataattttagtgcacacttaaggtgattcttatcttcctgcaaaaatagctcctttaggtatttttcaaaattttatacatgtatatttctattccaatcatttttggggtacaagtgatttttggttacaaggttgaattgtatggtggtagtgaagtctgagattttagttcatccatcacccaagtaatgtacattgcacccaatatacacctttttttatccctcagccacccctaccccctcctcagtctccagtgtccattatatcactctgtatgcctttgcatacccatagcttacctcccacttacaagcaagaacttcatggtatttggttttccattcctgagttacttcttttagaatagtggcctccagctccatccaagttgctgcaaaagacattatttccttcttttttatggctgagtagtattccatggtgtgtatatatcacattttatttatccactcattgtttgatgggcatttaagttgtttctacatctttgcaattgtgagctgtgctgtgataaacatacatgagcaggtatctttttgatataatgacttattttcctttaggtcgattcccagtagtgagattgctggattgaatggtagatctacttttagttctttgaggaatttccatattgttttccatggaggttgtactaattgacatcactaccagcagtgtataagtaatcctttttcactacctctacaccagcatttattgtttgtttttgggatttttttgtttttgtctttttataatggccattctggctaggaaaaggtggcatatcattatggttttaatttgcatttccctcctttaggtattatttaatgagagtcttttggtggtaaagtatcttagttttcatgtgtgctcacacacacatacacagagtctttagtgacaggctagttgggtatcaaattctgaattgatgtttttttctctaatacttttaaagtttatttgtgttctggcatctgttgttactaaataaaaatcttccaccagtccatttgagttcattagcaggtaatctgcctcttattttaagcacttttaaagatttttctgtatcttgatgccatatgatagatctaccttttattatactttactcagtaattactgtgggcttttaatctgcaaactcaatcaattattcgattttataaaattatcagtaataaccttttctataactgattatttgcagttgaattaaatcctctctttctggaattccaatcatatgtgtgttggagcttctcaatctgccctccaaggctcgtaactgctcttttaaatttttcagtactactctcaattttttttttaaaaaaacaacctaatattgcagtgtttggcacagaagaagttcaaagtacaactttgcactgccacgttgaccagctattctggcactggttattctttaaagttatttttaaggttaacgtaccttatcaggcagcaggtctcaaaacctagggaagcttaaaagcctaaaggcagcctggcaaaaatcaagctgattaaaatgctctttcccattttcttgtcctcctatgccctcatccctaaagaatagtgagagggccttccttaaaaagatatgtataaaatagcagaaagaaaaaggggatccagcaagcgtgagaagacatacttagataattcacagtaaatgttccaaataatattcagcctcactaattctcaaataaatgtaaaacaatggcagatcatttttatccattaaattagtgaaaataggaggaaaagaacattttgctgacaattgttaacagtgaaactgaaattctcttcttgtctagtttgaatctaaattaggacagtttgaaagcaattgggtgatatctatgaaaaatctcataaacattctacccttccatgtagcaacattgcttctgtgaatcaaccattaggcaaataaatggaaataacaaaccaaatttccccccacctcccaagagatgtttattgtaacattactgataatattgaaaaactagaagcgatctatatcagtgatccacccttgttttgactgtcactcaccgtaagaaaatattaggtatacaaagtaacccaacagacacacccatgcatcaaaaagttccatataaggaaaccgttcaatccattccatttatttaaacaagccaatgaacaaagctggctttgatccactaaattgatcctacaacctaagagtaggttatgactcagtttgaaaagcaccaatctgaatgtcctataaaagatatatgatggaatatgaattaaatttgatattcacaattttttacttttttttgtttgagggtagttggaggggtactatgtttcttcagccagcaaggaagataatgtttctagataactccatataatggagatttactgtaatgataccagatctgttctactatgcccagccattcttatgtatctgtctctcaatgcatcatgggtcctttatggattcttttgtgatgtcctcaagcttcctgtccactccctagcaacttgcccaaactgatagaaccggcctgaatcagtcaacatctgatttcaagcattttctcttggtcagcctttggtattaggactttattctcaatctaatcaattaatattagctgagctaggttgatttcatttgaatcaacaaagaattgctaaaagctgcatttcctagaaaatgtggcaatataattggcaggtacttgagagtctttaatgttaaatggaaaaaaaataaaaaataataagagacaactttttatacggagcatgttttcggttttctttagatattttgttagagacaaaaaaggaatccagaatttattttatactacattagtacttaacagatttctacataagcaagtattatgcatttgtaatcagaaaaaaatatcaaaattagctctgtggaaaatgatcatcttgcaagcaagcatcatgtacccctacttttgatttagctcatcttcttgatgtaaatatgaagtgtctgcgcttgaaattctgtttgaagtggaaatcttcatgtttgtcttacaaataccatctcagagtacattgctcagtataaaacttgttttggggggttgggtacaaaaacctgcaaagatatagtccaggctccttttcccaaagtccttcactttcctactcttagtataaccattattttgtaaaatttaataaggcccctaataacttggggtttgggaatttgatttgaggtaacatgcctcagagtatcacctattttttattaaaccaacaaatttctatctgacaaagatgtgcatttatgtgggccttaataattcccccaaataaaactattcgtaagttctaacagttccaaatacttttggtttcagcacactaataggatttatagctgtcttagataaggagcagtatcttctaaagctcatgaaaaagccatatcagaatgccatgtgttcaggtatatttccttttctttatggtatcaagaataaaatctcagcttatgttttcactcaagtgttgtgtgattactttttcccattactctttcgattgagcctgaaaaatgaggtgaaaaaatctttctctttcaaggatgaactagaaggatctaggctggctggtcaccaaaccactgactagttggccctttgtctttttataacccctcattgtctgggatccaacatcatagtgagtctcagacatgttccacaagtctagatagccctcatccatgtgttcagtggtccagcccatcagcatccaagccagcagggtgaggaggggaagtgtaggggatgctcattgccctgaaggatgcatatgccacttccattcaggtcctgcttgccagaacatagtcatgtgaccacagttagctgcaaggttggctgagaaatgcctttcactgggttctattactaactgaaaatgggaagagtgaaagttggggataactagtaaatattagttagtccaagtcatggattgtggtattaattccatgtgctaggaaggtcatttaaatgttttatgcagaaggatgccatgatgataattatgtttcaaagcatatttgtgtgtgagagagagagactgaaagagaaagtgagataaatggattggagagaatttgtctgagtgttaagaggccattctcaaacccaagtgggaaatggtggctagtaacagtagtgaggataaagggggatggaatggactcaaaagatacagaagagataacatcaaaagatgaaacaggggcagaggaggaagaaaagacatccagataactcctaggtttctgatttatactgcaaattctggggatcaggtgtttatggaccactgagtttagttttagaaacgtgatttagaggtatttgtcagataggtggtttctacacattcaaaataagatttcaaaacatattagccacaattcacaatcagcaaaattctcaaatctagtcattgtcaactaaactattaaaatgaattttcccctctaagtgtttctcatcttaaagggtttgtatgtattacatgtcacagtatggtttattgcatataaacatgggaaagcaagccaggcagaaggagtcttgtaaccagctaaaggcccagctaattcttgaagcagtcataaatcatgaacggtcttcttgtgttaatagtgtggacaggactgttggtcacacacaggaaaatgagtcacacagtcttgtgtgtacagcaactcactccacactcaatgatgggaatggtcatgattgttctaactgtgtgagcagctacaagaattatggcaaagctccagagctagaaagctggttttttttttatgtcacccgagtatgtaattcactaaatgtttagtattttataccttttagttgacttgtgagccctttctaaaggagatctatttccctctactagaaggtaatcagaaaaaccctaaactacgttttctaaatgctgtgttcttctgcccaattgaccaaaatatacttagttgattaggactttgaagggatgagatgaggggactaaattaagatgcaggaatttcagttttctaggggttttctgtaaactactttatactgctgacaaatggttaaatgtttccaatgaaactaagtatgctaggatttctaatgagcaatgaaattttagaattcatttactcattaatttcttcatttacaagatgtacaatgtgctatcttctgggcatttggggtactttaatgaggtagcagtgagtaccacaaatggtcacttctgcctttgttcttatactccttagagaagggaaaggaccagattcagataccctatcactgctttctacccatccagatcagagcctttgctgagttctaacgcttagccctcttctcagctgatttggctgcctccattgtaataggcctcatgagactccagcctaggcctggccttcagttcagcaggcagagcccagagatgtactgggcaaaggtcaggggatttattatatgagacaatggtctgatgtgatttaatttactcctctggtaccagatatgtgtgtgtgtgcatgagagagagagattgagaatgactgatttgggagggattttgtgaaggtttatatatcaaagcagaaagaccaagaatttagagattaatacatgccaagtggtaaccaagaaacttctgtgggatcccacctccaacccctccctctctgtcagattttaaccaaatcagtgtgatgtgatctgcttgcatatatgagtgaaagaaaaaggaaatttaaaaagttcttgatataaagcctggaggaaacaatacgaaaatccagcctctatttcagcaatatctgccggactattggttagtattcccttactgttacttattgtttgattaaaaggctgatagtcagggttttttttttcttacttttgcattttttagatataaatctttaatatatggctgtggccagatgttttcctttctcctcccacttcgttcttccctcttctgggttaatttctcattgttctctcttccccttacttctctgcccttttcctttctactctaagcgaaacttctttttttctgtgctggagtttataaagtattcttttaggcaaagaaagcctttggctgccttcctccttgtctggtcaccatcaagatataattttggttttcaaaggttgttctctgaaggaaggactagttttctgagcatttagagagcagatacattttgagaaagtcaacagagatagtaatttgcactcaggaaatacttaagggttttaattctgttccatgtgttacatttcaacagtttacattaagaaaagtattgtaaagagaagtgataccacaattgcatgtttattttgcatctttagtctgagagatggtcagtactttgaaggaaagagaaatagggctttgtctccttctgcttcttgctatacctcttttcagattaactctgatgctttgggtttcttactgcatgcctgattaaaacccatcccataatgcctgatgtgatgggaaccaccacttattctatctcaatggaaagtattcacatgagctttcaacagaaggacattctcccacctcttccaaacacctctttgaaaaccgtgtccatgggcctttattcatgtcttcaacaatttgtttaaaactggttgtgctaggtagtgggcaatataaagatgagccacaggagagagatgacaatatcactgattccttatagtgctgtaataagggtttattaaggctgtgatagaagtagagaggagaggcacctgacttcacttgggagtggggttgttgctaaggtgtttctaagttgaaatgtccttgagctgaggtttaggggaatgagtagcaaagatggattaagtgagaagagtataggaggcagcagggccagaggtgtgaatagcccagaaccttctgagaagattcctttgtggacggaagaaaggggaggtttgtggaaatggtggaagataaggtaggaagaggccacatcagatcacacatggctggatgtacctctctaaaagtactggggggtttgaaacagaggctataaattggcagtttaagaaaatcactgtggtgtcagtgtgaagaatacatttttgcaagattctaacgaggattattttcagaaatttaggcccaatttagtccagatgtcagggctagtttggagtaaatttctttctttaattactccagggctcttgtattgcttcaaagaaagtagaaagtggaactcaccctcattcagggagggtgggcaagcgaccagccagctggggaaggccaaagagccaggtcaccttgtgcccgcacttgttatgatttgtttgtattgtctgcctgatgatcaatgatattagctatgacagcacgtatgagcctggggtaagtgtgtcttcttgctacttgaagtgcttcttgaaaatagtggcaggctgaagacaacaaggaatactgaaaaagcccattggactggggacaggagacctggtgctgctcccagcttggccggcaccagctccgggggcttagacacattacttcacctctctgggcttaacttaccccatttgtaaaatgcaacctttagactaacactgttctcggggccatgttcagcctctggcttctgtcattgtgatcctgcctccccaaggttcccctgggccccatcactactaaccctaggcttctagacattctgattcatagagaaataggaaagcccatttatcttaagttaatgtcagccagaagtacagttgtgtcttaaggaatctaatctagtgaacatggaaaataattttctaaggaaaaaaattgtgattggtgttctgtcctgaactgatggcaaaagggaagcagaaccacttcacacatctcaatctctctgttttttcctttttatcctcttgaatttttctgcctgtttgtctttcaaaagtagagaggagtttgaatggggatgctgaggagactgagggtagccaccgatgggggaagctggactgtgggaagccgagttctgccacctgacaaaggggcacgtgtttagtgtttatttggcatagcagctgttcaggtggagcccaggcagaattttgatgtcgttgggaccttccatacctttctgaaattctcttgcaccaacacccggcaccctcaggttatgttctgctgcccaaagcctgaggctcaacttctagccctctcttttctcttttaccggaactaacttctaaaaatccagaaatgacaagtagatggtggtctggatgttcctgaggtggaaagagaacctctagtgcctctggctgacattatatccactgacagatcccctcccgcacgcatacatgtcacatgtttctgctcatttatcaaatacagcccatgctttggtgattgagagcagagtggggattataagttgatgcagtaggcctgtgtcttgcccttagaagtttacaaacagcaacacaggcaccaagagctcatctgttacacccacagggatttatcatcttgtgacttggatattgtggaatgttttatagtaaaggttaaaaaaaaacaatgtaggcacagaggagttaacagctaagttgcggtggggagtctggaaggcttcatggacgtggtgatatttgaacgtgactttgaagggtaggtagagtcctgatttgtctaacagtagccttgaaagtaaaggaaacttgaccatgaagaaggctgttgaaagtctggagaaaagagaaggtaggagactaagactctaggagaaggtactacgttccagggagaatgcagaggtagaatcctccctcatggtgacaagttaaatgtgagaagggatggagtaaccaactgggtgaaccctgatctcattaagcaaaataagaaatagaagaaatgaatctgcatgctcataatgtagggatcagaagcaggtaggaaatgctgactttattttagacagaggttattttaggtacctgtggacatccaggtgtattatttccctatgtctgaagcacatgtcctttggttctttagcattttgatgatgatgctccatgtaaactgccccctaggattttctataagttttcttcctcatttgagagtaaagttttaactggtaacatgatcacaagtggttgaaaagttaaaatgttattcatatagctttccaatgaggggagcatgaatggtttggtactgttttacaagatgtgaaaactgatttcacttaagtagactgtaacataaagtttatgtgtctgtccctttggcttcctggtaggtggacagtctctctgaatcaatagtggctcaggcttctgatttcaaacctctttggccagccaactggtttaggagaaacatggccaggtcattgaattataatttcctgagttatgttgtggtggtcccgtaggacagtaaacataagcctcctgggaactgaacttttaattcaggaggactgaaaacaagctcttctgagccaagatttgcaaggacatgttacaaagatagactggccttcctgcttccacaccattttttcctccataaatacatgctccttttccgtatttttcttctaccctagtctgttgtagattttgaccttggctgttactttcctaccaacacattgcctatttttaagtttcctggtttgacctgatgttaagatggaaagcaaagctagcaaactgatggagatagggccttccagcctttctaactttccctgggatcatcttatgttgatttacatgttcaaaaaatttttaaaaataaataaattgtatcagttgatccagaagtgattagactctaggggcctgatttatcttagccaaacttaagagatgagccaatacaccaaaatgccaatatatttgtttgttctctatggcactgtcaagcaatttcatttcatctgattactgtgttcattttcctgaaagatagtgaacccagaaaacaagaatcagaaggtcatttgacaactgtggagttggaatagagggaactgaatgaccctctattgggtcatgagggagagcatcatcaagctttgagaaattattgcacctgtctctgtgttgggacatttttttggtcccaggtagttggaagagacaaagctgtaaattatttactagtttttcaacatttccttatcacttatcgttaactgatggaactaagttttctctaaagtcccttatgaataaaattgctagacattgcaaaaatgcccctctcaatattgacatgcttcagtggtgattatcttcctgattaatgtttacagtcaatctcaagctctataatggactcttaaaggctgtagtagttttctattgcttccataacatattaccacaaacttagtggcttaaacaatacccatttattgtcccacagttccatatgtgagaagtctgggcacaccatggcccaactgggctcttgcttagagtttgcaaggcagaaatcagtgttgttagggcctctagggatgaattttcctccaagctcattccagttgttttcatgaactgagttccttgtcattgttggaccatgttccccatttccttgctggctgtcagctgggagccagtttttgctcctagaggctatctgcattgcatctcatggtttctgtgtgcccccttccagcaacaagattctatgtacccccttccagcaacaatattctatgtaccctcttccagcaacagaagatcaagtccttttcaagtttctagtctctctgacttccccttctgccatatctcattctgcttttacaggctcaggtgattacatcggtttgtgcagataatccaagataatctccctgttttaaagccagtgggttagccatcttaattacatctgcaaaattccttcacagcagtacctagattagtgtttgaataacccaggatggtaatcttgcgggggatcttttagcattccatctacccagtctcatcagcaacactttgaaatattgtcgttgagtgatcatttctgtggccggctgatttcatctatacaagtgtattctttttatttgccattttataggataatattttctgatcttaattccatatttcagtattaaaattacttgacatagatccataaatcatcatctgttgcaaaaaagcacattaattgattggttgaatggggagattgagatatttcttttctcttcttctgctcaggtgggggcaacttttgggggcagatgagttctgttgccacaaaagttatatagcacatttggtttgcactgaatcagcgattctcaatcctggccatgctttagaattatacaagaaaaatcttcaagtatcaatactcagtccctatcctactgatccaattcatctatgataaagccagagcattgatttttaagttctgcaagtgattctaatatacagccaaggctaagaactactgatatgttccaaacactctattttggagataaagaagttgaggctgaggatgagaacttagtcacataaagttccataactagtaacagacagaagttctgtcctacaaaaaaaaaaaaatttgatgctttaattgtatgtagagttcagtgctcagtaattatgtacaaagtgagtgttgagacgatctggaacaccctacttcttgctttagtaggaagactatttctttctactactttaaaaaattatcagatcttgcaaaataactgtatgaaggtctcttctcagcagctttggcctgccttgtgagtaataataaacacagatctattctacactaactagggagctggccgcttggacttctactacctctctgtgttccagagcttcatggtacaatgcagtagccactagccacatgtagctattaaacacttgaaatggaactagtttcaactgagatgtatgtgagtgtaaaaggcatactagaatcaaagatccagtatgagaaaaaaggtgcaaaatatctcattaatacttacattgattacatgatgaaataatatttgaatatattgagttaaataagatacattattaaaattaatatatcaatttttaacttttttaatgcagttgctagagaatttacaactatgtatgtggttggcatttgtggctcacattatatttctgttagcacttttctagggagtattttctattaaagctattaacaatgaatggtccaagtccaagctattacacctcctttgatcctgaagagtgaaggggtacactgtaaacttcctggagatgagacatgatattgatctgccctgtgtttgccatctatctggcagccagtcagtctggccaaatagacttctatttttacatagaagcttaaaggaggcaggataatgccccatgtcatggagagagcacactgcatagctcttgagtaatgtacccaaaagtagaccaggtgctattggaggttctaaggcatagcgataaatattacatcccttgagcaatgtaatacagcccttgaagaaactgccatgtcagcacttatgaattatcactgtctttgacaggccctatgcactgaaaatattatggtgtctacctctctttataattcacatccaaatattactctgtctttttcttgctccctgtagtttgttctgattcactgctaccctgattgtgtgtttagtttgcctagttcacaattgaagaagcatgggaaagtaaaggcaggccttggaaagatcaagcacagttcgaaaccctacccagaattattctgtctgtgtgagcttgggagatttacttaacctctctgagctcctctaaacttccattttctcatttgtgaaatgagcctttctcttgcaaggtctgtctgagggttgaatgaaataagaaggtacctggcacacttattttttgggtagatgttgtagtgaacatctactctgtggcaagcctatggctaattgttaggatgtaatcgtgagtgagacacagctactgcttccagctaagagaagagaaagacaaggagcctggtaacgtcgggacatgaatagccgtcaatgaaaggcagctattattacactgcacagtgcaggatttggcttataacaaaattttagaagggtgttcaggtgagggaattgagacccatagtgattaaatgactacctgagtcaccagctcggacaatgctgggctgatgtcaggttacgggattgctgactcctcctctagtaatgcctttcctgggagatcacattgcctcactcttggtttcccaacttgtttaccttcaaagaataactttaccatgttggactcgataaaaggaaagaggggtttcctccaatttttgctccatttgttattagggcatgctagtaactaactgtctttgaaaacctacgcttctgttaactccaaagaaggcaggaatacatgcacttctttaagatataaaaagtatttagtatactataaattattatagtaatcattgttagattatatctcaccaagataatgaatgtttttgtttgaagacttcactgtatgagaaattgtctcctataccttatttatctccttttagattaggtaaaacaaaattttcaaatttgagtctgaagaaaattccaacatctttaaatttgtttaaggaacattttccatgatctatatgatctatcatagtaatttaaaaaatcagattttagaatgagccacgtgtagaaagagaaaaaaagtagaaagtcaataagaggtttcatttttcaaattttgttttggaaaaaactacttggtagggacaatggtgtaaagtaagatataagaaggaatatactgttcaaataagcggccatgcaattgattttctctttcatgtaacaatcacatctgcattgtgaatccgttagtgcaccaagtgaatcaagcttagtgagttgacaaacatccacagggatagttgcggggaggcattataaagtgcaatgtggtcctagtgaaacagaatgcttcgttctttgagaaagttccactctgaatagaataacggtgcataccaatatcggagtatggccaagcatttggctactgacatgccccttcttctttcactcctccataaaggaagagacagagactcaggttcttgtaactcagttgccttttttgagttctcccaagaaaagttctaacttcaagccaagcgtcttgtcactgggatttctgtatctaatttttagttctagaaatccatgatttcacaaaacaaattatccaaacctaacgacaaccacatagaactttcttaaagtagacgagggaggaattagcccctaaagtatttcctgcacaattggaactcactatagaagatgtacaattgcctgtacacccaagcacaaataggctgtattattgccttatcctaggagatatacactttacattatgatggtccttccctttcctggaccttcatatgatgtaagtgcttgatttaggaatagggtcttacatattgtggctggcgaagagcacatttgctgattgctctaccacatgcctagatgtcctcttcatgatatataaatgagggtccctactctcaatataccccataggaacataataaaacataaatagtctatttgttactactaccaagaagacttcagtaagtgtaataactaacccttttggatacatgcagagggaatgccaaatgctttaaataaattatctcatctaatcctgatttttttattaaaaagggaaaatcttatcatatgaatattagagatgagtaaactgaggtttggtagagctgggatttgaacctagccctctgtgactccaaagcacattcacttaaccccaagcccaccctctctgtaaatgaagattaatgatagcatctgtggtagaagctaatgtctcctgacctgggaaaatatctttcaatgattattaactaaatgtgatcagctgccagtggatcagatgtcatcaaataaaatcgagtgtccagggtttactcaacagtactgtctcttacattttttatcaatgttagtagattgcttaatctttgtacctgttacctcacatgaagcctagatagcatcagtcccttccccagccagtttgtgctgggttcagcttctggcttgtgaatccagtcagtgaattaatgttggtagcttaaaaacagccctgagagaggtatttacatcacagaaattggcaaatgatacaaatcatgaccctttttttaaattccagggagacaggtgttaaacatttaccagtacaccactgtctatgattcaaatcgggacataataattgtatttctgaaggtaaacaaatgcacactgagtacccttggaaaaaagcaaccttccacagatacaatcacacctaagtcacctaagtctttagtgaattttttgtccccatcattctgcatttgggaggaccttttacaacataaccataatgattttatatgtcatttgaaattttaaaaaattactttatttgttcatttttgttatgaaagcaaatatgcccatagtaagcatttaatgtttttgaatgtaagtgcagacatataaaccataaaatgtatatacgaatgctaccagtagaaataaaatgcaagccacatatgtaatttaaaattttcaactatagtcatgcaccacgtaatgacttttcaatgatggactggtcccataaaattataaaatcatgtttttatgacatcttttctatgtttagatatgtctagatacataaatacttaatattgtggtaaaattgcttatactattcaatagagcagtaacctgctgcacaggtctgtagcccagagcaataggctatcccatatagcctaggtgtgtagtaggctataccatctaggtttgtgtaaatacactctgtggtgttcacagaaccatggaattgcctaatgatgcatttttcagaatgtattcctgtcattaagtgatgcatgactgtaatcacatttaaaaaataagaaatatttgttttaataatggattttatttaattcagcagttaaaaatatgatttcaacttgtagtcaacgtgaacattatcaagatattttgcatcttttcttcttgtactaagctttcaattctgtgtatattttatacttatagcacatatgaatttagatgctaaattttaatcataaatacttgatctgcatttacatttcataaaatgtaaagcttaaaaagtgggttcatatatccaatctgttatagacttacatatttaattaaattaaatttaaattgtcattgaattcctcaattgcattagccacattttaagtgctcaatagccacatgtgacttattgtaacataattggtcattgcaggtacataccatatatccttattttataaaattggaaacctaggctggatgtggtggcttatggctataatcccagcactttgggaggccgagacggaaggatcaggtgaggccaggaattagagaccagcctgggcaacacaccaagaccttgtgtataaaataaacaaataaataaaaatagctaggtgtgttggcacatgcctatggtacaagctatttgggaggctgacgaaggaggatcccttgagccaaagagttggagactgcagtgagctatgattatgccactgcactcccaacctgggtggcagagtgagacccatgtctcttcaaaaagtaaaaatacaaataatataacaaataaataaataaaattggaggcctactatatatacaactcccaaaagtcttttcccccctcacacgttacacatttaaaattcccatcctgcattccctgctggatctccaagaggagagaaatctcagcaaaagtagttatatcaaaactgtctgtgagctttttcttcctcactcataggaaggaaataaattcacataaggcattttggatctgaccattttccaaattatcatcaccataaaaagttggtaacaacatgaactctgaaagcaagctgtttcaatgcatgcctggtgctaatgaaaaccagcagttttaaatgcccttttgggttagcttcttcctttttctgtgctgtattattagaaaagcttcaccaaggagatcaactagatataatttcacaatatttcttagtaatcaatgttggcatttactcttcccatatattaatttattaacatcatgcttctaaggatgctttaatcacttttttaaaaaaaatacttgatacaaattagagggtgttagttattttaggtggtgatttgttttgtttctgcaaaattacaaaccagatatgagcatattattccctgtgtggcttaataaactgttttttcttttttgagacagagtctcgctctgttgccaggctggagtgcaagggcataatctcggctcactgcaacctccgcctcctgggttcaagcgattctcctgcctcagtctcccgatcagctgggactacaggtgtgcgccaccacacccagctaatttttgtatttttggtagagacggggtttcaccatgttggccaggatggtctcaatctcttgaccttgtgatccacctgcctcggcctcccaaaatgctgggattacaggtgtaagccaccacgcctggccaatacacttttaatataatttttgataaaggtgttatggagacttgtcaccaaatagtctagtcttcacattaaattcacatgatactcctcatctctatttagctctctctcacctccagtaatgacctcccttgtctctcagtctttggtctcttaccttcagcttcccactagccgtttctcacatttccaaaagtcttgtaattgccttaaaacaccaagtatccaaagcagtcctatgaccttctcctcctgctaaccaactcagatccccaaatcctgatttctttcactagcactatctctcatccacacatactcagttatttgtgatagacatgtctctatcatctctcatatccaatcatcaccaaatcttatcaatacttctcagtgatattaagttaagaagtcatgaagggcggctgtaccctaaggaaaacccacttttgcacaaatctgagtttctgatcaatctgagttcagaatgctgttttaatctggtcctacctcgccaatctaattttaggcccttttattcgtgaatttgaaccttgttctctattcaccagcttcctcagaatattgtccaaaacatactcagaattcatactcatatccagaacatttgctctgagcttttaccatacaagttcaccacagtttctctcccttttccatatccaccaaagccttatctgtcatttagttttaattttaagcccttcagtttgatagctgatttttccctagtctgaccttctattttcgggtatgctccttcttttcacagtttcatgtgtttgtactgccttattcttgaagaaccattattttgattgcttttgcattaatctccatagtgccttgctcagtgttagcaggaactagtagtttaacaaatacttgctaattctaaattaaagagcatgaaacatattgttttctttgcctggagttggttatagcatgctggaaaaagtattatatctaaccttcatcttttctcatgtgtttatgaactgttttatagccaaagaataagttagtatatcatgggcctaattatgtaatttggaggcctcctctgctgggcagtctacagatttaaaattcatgccagctgcattacgctggttttgaacttgctttttcttgagaaagatggggagcagacaaaatgcctcaggctttgagggtagaaatggtgtgagttccattatgcaagaatagaaccccattttttaatccctcctgctgaaaatcttgccatgaggctatagccaaagaatgtgtaaatatcaaaagaaatttagagagggattttccctaggaaaatattgcaagcttaaaaaacccagtgggctaaggtccaatttagtagattcctccgaacaatgccatcctctacttagattgttacagaacttcttatgacagcatttgagtagactcctgtacctctgggttaaaaggtacatgtaataagtttaggtacctgggcaaaaagggcttggcagaggggaatagagggactttcttattctcacatctagtatatcattacattgtaatgttagataacattaaagttccaaacttcatgtgtccgcactctgacgtttcctagggacattttgtctcagctagaatctaatagagaaggattccctcatctagaagcttccatatggggctctgtgaagatgatgtggacagtgtacaatccaattgaatgtcacgtctcgtggcctggctcatgtgagggcactagagagagttctccagaggagtgcagatggggctacttttggaatcattcccactgagccaacatcagtggaagagaaggggaggagttagattctaataaagcccttatcttctgctgaatccatccacatttttttatcctcctcctggcccctgcacttagttagagtcgggtccctatgcagtgttccaggcggcagtgaactgcattcacctcctgtttgggagcatggcaattttaaatacttttttctgctgtaagagtatgcaaacagatttctggttaattttgtgttgaggattcttgtttgttttttgttttgatagagcacattctatggacatatgttcagcttgtaaaggaagtgttatagttccttttttttttttttttttttttttggagatggagtcttgctctgtcaccaggctggagtgcagtggcgcgatctcgactcacttcaacctccacctccctggttcaagcgattctcctgcctcagcctcccgagtagctgggattacaggcatgcgctgccatgcccagctaatttttgtatttttagtagagacggggtttcaccatgttggccaggatggtctcaatctcctgacctcacgatctgcctgcctcggccccccaaagtgctgggattacaggcatgagccaccacgccccacctagttctttatttggaagaagtgaagttcatttgcaggcagctgctttcaaaagtttggggattggaggaaggtcatcttctattcaactgaagcaaatgccacttgtttgtggcatctgccaggcatccttgagatgtctgaagaggtgacttccaaaccagaggatgcagccttccgagaaatgcaaacctgttcacattcttgctcagatgggaagcagaaaaggctgcgtgggaattggggatttactgttatactctggcattggaatagcaggtgctactggaaacttctttacctgacactaagtgtcttgggagataacaagtaaaattaacacagcatccagttcttcagtgctttctccacttaaaaagaatcaggctgggcacggtggctcatacctgtaatcccagcactttggaaggccaaggcgggtgggtcacttgaggtcaggagtttgagacaagcctggccaacatggtgaaaccccgtctctactaaaaatacaaaaaaaattagccgggcgcggtggcgggcgcctgtagtcccagctactcgggaggctgaggcaggagaatggcgtgaacccgggaagcggagcttgcagtgagccgagattgcgccactgcagtccgcagtcccgcctgggcgacagagcgagactccgtctcaaaaaaaaaaaaaaaaaaaaaaaaaatacaaaaattagctgggcatggtggtgcacacctatagtcccagctacttggaaggctcaagcaggagaatcgcttaaacctgggaggcggaagttgcagtgagctgagatcgtgccactgcactccaggctgggcaacagagtgaaacaaaaaaagaaaagagacagaatcaaatgcaaagtaaatatttagttaccaacaggatggcatttttagcctataactttttttcagccttttaatatatttctgctggaggtttccagctttgattacatagcctgttcacctaggagtaaaggacattgggagggagagatgctcagtggttctcatttgcaaagtagacgaggatgatgaaaggccatcagctcaaggccttccaggttaggaattaaaaacatgaatgttgtaaaaaccacaactcatatttatttgaaatctcacaaagtgtgagatttatttgaaatctcacaaagtgtgagatttatttgaaatctcacaaagtgtgagatttatttgaaatctcacaatgtgtgagatttatttgaaatctcacaaagtgtgagatttatttgaaatctcacaaagtgtgagatttatttgaaatctcacaaagtgtgagatttatttgaaatctcacaaagtgtgagatttatttgaaatctcacaatgtgtgagatttatttgaaatctcacaatgtgtgagatttatttgaaatctcacaaagtgtgttcatctgcatgtttctcacgtgaaatctcacaaagtgtgttcatctgcatgtttacactcaatcctatgaacgactccatgaagtagtgtatgaaggagagttcctcatgcatgtggatttgcacatggggattcagatacaagaagacaatttagtttacatagagatgtgcttttttaaagaaatttttaagaatacaaaattatatggaacaaaaaagataggtcctctgctgtctagaaattaaagtacgtcaagaattttatccctatgtagaattacacagccattgccgggggccacatctgtaggcccatggaaaaaaacatctttgctcattatttcagcctgattagggataccatgaagggctattccattaggtcaggtttgcacagtaataaaaatgaagccagtagaggatctcgtggagctcctggtatgatgataagtctctgagtaacttgtaaatagtgcaattttatggaaatgttgcagctaagctttaaagtagttggcattagttgtcagacacagcaacagctctacaaaaggcaatacgctgagttcattttcaaccagcccaaacttgcctcagaagatccgggatgtggacaccctggtatattttttctagaaaagcttatttccttcctccagataaaggtgtatggtcactgaggtgttgtgctgacagaagtgttgatctactctctccgttagactgaagggctccaggtgtggccacactgggcttctaaatggctagcaaagccacagacgcatccctcttggtgtctgaggtgttcacattcctgggtctttcagatctgtattcctcatgaaaataaaacctctctacgacacactgtgtccttgtgggtttttagttttactagggagtttttgtttccttttgcttccctccttctttctgcttcccttctagttaaacctctttaggatggctcattagcaactcgttttgagtggtttgagctcttttgttcactgggaaacagatttatgaaatgttactattaccatgattgttatgtttttccttttatggcctgtccagctcaaggccccatgctttctgatactgctgataaggttttctatttccagatcaaattaaagcaaaccttactggccctgttactgaagctgtgcatgggggtcgtttgctgtgaggtgtttctatggctttgagccagggtatgaacatctctagtgttcatgttatttcctgagactagcactcacgggaagtagaatttattacaacctgctgtttgagttcatgaaaagtaggacaatatgagactctggggcagtgaaagacttaccaggattccttctggaactgactcgtcagctcattcatgtcttacccagtctttaaacagtatttcatgataatggtctgcttttaattgctgggctttaccttaccctttttgtgattgcaggtcctacaggtatggatctctggcagctgctgttgaccttggcactggcaggatcaagtgatgctttttctggaagtgagggtgagttctgcttttccatttccaccctcagtgttttgaaacaacactgaactgtattcgctacatccaagttttttggatgattttattaaaagatgcaagttttacatagcagcaaaaaggaaacttgacttagctttaaaatcagaaactagtaggacttttctgtggatgtttaggaggaatgcagtagtcagtcaactttggcatctgatgttttcatatcaaaaattaatactacaaatcatgctgaggacatttatgttgaagacaagccaggtctcttgttctcaggctttgggagagatattgaaattacactgaagggttattagcttactgttcactcagctcatctgtgactaaggatatctaatctatttccagagctcagaattcaggcttgttaatcatattctcagagaaaagaaattgcaggtttcaaatgaatttcacttctcactctctgggtgattaccatttggctaagttgaggaaagagacacctgaaatagttgaatgatatacccagaaattatgagcttccttccccatctctataattctccctcccttttttatatccctctccttgtagagaagtctcaatatgtttaaactatgtttcatagcagacctaactaaaacaaggaagagtaatagaagggaaagggaagaggaacttttctgtcagaaagaaaactgtgctctctaacgggtgggagacttttttttttttaatgagtacttgatgtttttccttgcctgggcttctacagaagaaagaaagaatatatttctcccatgctatgacactgaatttagttgttgctttaagagtgtcagactccccttctcaccattcagctcatgttggaaaacacagtttaacagcagacttagcgccttaagatgtcctccctgaccttctagccaaaaataaatccgtagtagtgagctgctgagggtgaccacagtcacttagaaaatgagaagagtaaaatatgttattttatctcttaaagcaatttaaaaatatttatagaaaagagtcataattgttggaaatattttttggtctctctggcgttataatgtcaacattatgcaagtcaaacatggagagaattgcaggctccatttcagcagcttttcccatggctggttttagaccttggttctgagccaaagaattgcagctgagatcctctgctgttccaaagtcatggtggcttaatctctcgtttcttcattaaggtgactttcactccactgggcaagatttgaggaatttaaaaaacttgtgaaatgaaaagtatggcataggaaatctttaaagaaaattaaaaatgcatccccagctgagagattagagctcaaattacattttagaactagaaagtctgcaaggagcatctgtttcagctgcttcgacattttactaaaactttgagttcctgagtgaagagaaaacatcactagttgcttttaatgtttgctttttgtttttctttttaatagttttgtttgattcatttatttgttcagggagagcagaatataagcaaatgcaatagtttatactaaacacaaatcacatatcctaccagtacttacgcataagaagtaatttaacaaagaagaacatttttgtctcttttttttttgtcttattgaactaaccaatatttctttttcctttggaatatgtgcatattccagaatcctttcttaaaatggtctaaggattaaggatggggcatgatgtttatgtaagaaggcatatgtaagcacgttccagtgtgtgtgtgcatgcttggctctgtgtgtgtgtgtgtgtgtgtgtgtgtgtgtgtgtgtgtgtgtgtgttctagttctggccacttatctaatgaatgggttcatgggttcagccaaagttactgcataacatgacatgggtcagtctcagataatatttatggaccatgtgtttgtttttctgccaggtctggattgtagccaaatcattttatttttattgtgtctcctattgaataaggcagactaaaaatatagattaaatttttaaaaagaaaagatactactattgaattcagtttgttcagtgaaagatgtggcattgatgggtaagtgatcttggaagcatcacctggagaaaagtcacccaggagctggtagaagatgacagacctgtatgcgtagggaagggtagcacttgagcagggattttcttgcttgggcagatgagcaattagaaatatactggccctgaaaggatttttttttattaaatctaattgccctgtgggaaatttaatgagaactaaatttgaacagtgccgttattgtgttagctaaagtgttgtaatagatgttttctgtctctcatccttaatatgaagttctcatccttaatatgaagctctatatctgctcctcaaagccagttacatagtctagaggagaattttttattccaaaatcaggaatgatccacaatgccttgttttcaaagggcttcacatggttgacctatcaactgattgtatcaaaattgctgctgctggaataatgttgctaatgagaaatgtgcataaagatctaatggatataagtattcttccaaggagtgcctgttataaattaggtcgtatatctctactatttcaatcagtctacccttgaatataccctttgacctcagtaacctaaggtggaagtaagcaagcccctgccttgtagttcagtctagctgggacatgaggaatgtcttgaaattaatgagagcctgtatacctttaaagtctagattgtgtgatgaagagaaatggtcaagatgccctgaaaaagaatagatcaaggtggactagaatagttaattcaacaaattcagtgtactgataattcttaagagcttcctattttcaaagcctgcacctatggctatgaggaatacattgattcttccctcaaggaacttttcatgggttaataaatcaggcatgtacaccaagaattacaatatcaggcattgtatattaactatcaaaatggcttgaatcacactttatagaagtgatgatgacgtgagggatacctcagctgtggtgaattacagcttcatgaaggaggttgacattgtttctctagagactagaatgtcaggtttaagattttaaaaggctgagaagaacagaaggctattacaggaataacttatgtgataaagcaacaacataaacagaagtgtacagatgtagatatgagatgtctatggacaacaattcattcacttactgtgctagtcaatggatggttctattttatgcatttaacattcaacaagcatttcttgagcacttacttcgtggaaggcataggattaatttggccagggtgtgtggtacataggtgctatatttgtaattattccctttggaagcaaacttaggtcagtaggtttgagtcaaattatagaaggcccagagatagcaaaggcattatggaaaaggcaagacttgctgggcccttgaaaaatcggtagcatttggagaggaagaaaagaaagaggaagtgtatgccatatccagccagtaatagtcctcaatattggaggccagacaaaagcgctacctgcatgatggaatagtgtgtgtgtgtgcatatgtgtgatattcatatgtaacatatatagtatctacatgtaatattgatatataatatttacatacaacatatttatatttgtatgtgtgtaatacatacactatatgtacacatatacatatacatgtatatatatgtacactatatgtatatagtatatgtatgtgcacaccagtgaggtgtggcttgcaggcaaagcacataattgacatcactcaaattctgcaaaaggtgttatatcattctgtaccattcaaagtaagagacttaggaatgagatgccacatcctaagggaaccaagagccccaaaataattttttctgtatattttgaacatttttcataaacctatgcacactgacaaaacacttacttgaaaggaaagacacccctgttctcattgctatcagacagcaacaatttattttttaaaataaactctattccaccacagttgaggttccacagagctctgagaggatgtcaagacatgtcagatatatttcacacaagtattagagtcatggtttcagttagtaaacagtaatgaatgcatctgttaaatgtgttcaagaatgaacacttcaaggctttccattcacagtgaaggtggggaaaaaagccacagagcttttgattgctgctgtcttcaccataatccagaggcaagaagaaatcttatggtgtgttctagtgcaatggcctgcgtccatgtacatcagcaatcctctgtccccttgtcctcctgatattgcagaatttatttgatgttggagttcagcaggtcacagcaagctggattaatctagatggtgccaatgtagataatgacacataaaaagtctttcaagaagcttttattaagtcattttacagattcaaggaggaatttcatgtatttatttatttattcattcaattttgcatgcatgcatttattcatttttttgttttagagataggaacttgctatgttgtgcaggccccaaacagttctactagcttcaaacaatccttcttcagcctgcagagtagttggcattataggtatgagccactgtgcccagcccaaggaagaattttgaatgtatattcctgcttttaaggagctcacagtctttagaagagaaaacagagaaataaacataatttaattgtgatcctcttagattattaaagggttttaatctaggtaataatactgttagatttttactttgtcagtaatactagtaataggataaaagtgaatttgaaagggatgaattagaggaggaagttgatgacaataggtcaggagagagataatctaagtgtgacagggatgataaaaaatagatggatcacaaacacggggatgttaagaagacagaattaccagtactcagagtctaattaacctgtggatttttgactcggggaactatcagtgccttcttttccatccatttctaagtttctgcatttttaattaatgtgatcatcagcaatgactcacgtttaatgcagtgaagtcctggtgcacagttcagcctattagcactaaagtggcacttgcacagaacaactctgtaggggaggaaacatgctgaggctggatgacagcagagtgtctaagctacgcttcttttgtactatttctctgaactcctcatgcctgtgtctaccctgggtcctgcagctgtctgctcagctctgcagtatggctgtggtatggctcaggctactatgcagtgagggtctacagcaaggacaaaggtctgaactccctcctcattgtagtctctggacatgtgtgactctatcccaaaaccttgacaatcccccagatattttgtcattgctagagtatgtacttactcatgggatacaataaaatatatgcaggatgagttgagaacagcagagccatgtgctgggcagagtctgggaggttggttaggctcccacggaaaatgagtgacctacccctacaaagaagctggcagtgtgagtgattagatttgtgccacagctaattagtaaattgaaggagtgggaccacccaagaatactcagaaccctgaatgttagttaaattcacacatgccagtgatagagtatatttctggtcttccgccttagatgccagctcttacgggaacagagccagtcctggttatataatagaatgtttccacaccactttggttcagtatcctaaattgtggctcttgttatggggtagacaggaatgaggttgacataacgtatttggtgtttggtgatggcaaagagtacctgttcatagacacacctggttgtccacctctggctagagaccaacccaagttcaactgtgcagaagtccatgttggcctttactggcccagccagcctctacctgagatcattccctacaacaaggggcccaggattcctcagtcaccccagcagcttttcccaaggaaaaccatctcatgaagaatttgccattgatgattttctcctcactgtgcatcgaagtcaatgggtttattactgagagttggttccttttaaaccttaaccttacactgtatatgatatagaactgtaggcaggccagggtcatcaataaagacatttttggggcctctacttggcttgtaaccacctgcttatccacagtactgtgcacctagcttgtcatcaggcagagtcaccagcagccacaacaaaagggtgcaccttcgtcttttccaagcagcaggcaatgtggctccattttaacttttctggcaatactcacatggattgttaaataatgctgtcaacagtgtcatcttcaaacccaaagcaaacttcctcatcatctgtagttagcagcatgaagacggtgatgatgtgtaacataaacacactttgaaatctgatgcaattgaccctacgaagagagtattccttagtgccctgtctggcaacttctggacagaccaggaggccttggggcttagagcacttcttcagcctcagctgcaaatccattttttcttgtcccttgttcccaggatgaagccacagtgtttcatcaggtacatttatcaggaatctctgtttctgtttatataacaatttaacttaagcctcaaccttcacagtgtacgcatcacatttccatggaaggattgcaggtattagaagatggtggatcatgtcttaaccacaggggaaatgtttcaggatgtttttatagaaactttcactaacaagcaggacacaggattggcagagaggtgggggtaggaggcaggtgaagggtggcatttgttgtgtttccctcttctaaatgaagttataatgacatctgtgtttcaagagtgtggcaagtttggactgagcttgaaataaatacagtttaattggtttcaaataactgaacaaaatgaccattccatgccctgtgtaataaaatgttatagaattaaaacttattagacgttaaaatccatgaaggatattttgctggatgcccatccttcagcattctgatgaggatcttcgtgtatttgttcaatgaataagtgaatcagcagctaaatcctgacctttgatttcctcagttctctcctgcaattgtcactgatgctctcatctccagtcctgagcaaggcaggagttgaattagtatccccttatagtgggaggggtctagaaatagctgtgccactttagaagctaggctttgtgggcttttccgggggatggaatgatttcattttcctgctttctactccacataccaccaagatcagaattctgccctaaacactaatgtgtgggagcctgatgtcctgcctaagtcttgtcaacctctttccaggtgactgaactccgaaccccatgcaccagtcactggccaacattctgcattaagtgacccggtcacccagcaccatccccctgacaccacctttatctctacaccacctgcctcctgcctgattaaatctcctcaaatattgacagacataatgatacctgaagatcccaaatccaaattttctttgcccctttggacattgaactttagattacaaaagaccctgactagggatcctgtggatagctgagtcaattttcttagccccattccttaaatatcaagtctttctaattttccaatgagagcacatgaaactctcaaggttaaaagtcaatttatattaataaaatctttaatttcttgatttctgaatatgaaaaaatgatactttgtgtattttttaattttttggcaaaaccttccaaatttgtggaaagagaaataatattgactactggataaccatgtgctatgtgtaaatattaacggattcaccttagtgggcactgacttgatgatgtttgccacattatattttccagagccttggctctcccaaaaaatgagaggtcatttttcaggggaggaccattttgtgtttggctaacatttaggacatataatttcttctcctctacatgccactgacccactgcatccctggttggagcaagaagagccatgctttccttaataatagctaatggtgaaaggatgtgttgtaacaagagcagaggaatagggaaacaggagaaagacagtcagttgaagagtcctgccctgtgtcagggcaccgtttggccagctgggcttgctaggagtagaatatagaaagtacatgaagtgccatactcagacagctctggctacgttgacaaactggtatatcatggtgcccaactttctttgttagctgggccagcatcataccctctagtatttgctctgaacttcgtaagcacggttgactagctttcttttcctctgcagttatcattcagactgaatagtttctaagaggctcttaatgagaaatagaaggaagtaagttaacttctgtgcataccttggccatatttgcttgacaaactgatgtgtatactaaagccattatgggtgtgaaaggcaaaagtataagtgctccccagtatgacctggctattttgtcttacttctatatttgattgctaaaaatatatgttcttgggtcaaaaaactcactttaagggaaaaaaatggaagaatattaataaccaaaatagaagaatattaagaactttaacatgagatgtatttagatcaaaaccatctctttttggatttttgcgggtgatttctccaacatgtttagaactgggttgctattcacccaaaggtggaaacttttgatgttggggaataccactgatgccttaaagcagagggtaaaaggaaaagactgaaattccaggctaaaatgaggagagcatggccaccactgagcccaaggtagcattcaataaatactatataaattactgatttatttctacagttggttgatagaagcttactatgatctgcctaagggtgcatcaaattcctctggtacttatcctattcttgactatcacttccttgggggcagcagttaatcaggtagaggcttatcctgtcaagagagtaaagggagctatggaggaactcgctgggaggagaagctggtcctcagagatgcttagggtttaggaccagtaagaggcagtctccacaccacccacatctgattcttgtctccttcttctctgctgtggtcaggagaaacagtttagattagggatttcagagcagtggtgttgaactttgtcaaaactgcatttgaatcccatttatgaattgtgtgatttttttaaggttgagttccccagaagtaggatgctgagacaaggattcctatgaaagtgaattattagaaaatggtccagggagaaagcgataggagagtcagaaaatgagacggggaaggtaaagaaaccagacaaggatacaatatcaagtagaatccaacagtggtgtgggtgggtagaagtatctgtctcagcagattttgagttgtccagattatcctcagttggtggttaaggttaaatttgcatcctcacgaggatgcaaatttctacacactatcagttgtccaagtgcaggtaaagctggctccagcagcctgagggcagccgacagagagacacgggtcctgggtgtgggagtgaaaccacacatgaagcctgcatgtaaaaaaaaaaaaggtaaagaggggctgggcgcgatggctcatgcctgtaatcccagcactttgggaggccaaggcgggtggatcgagaggtcaagagtttgagaccagcctggccaacatggtgaaaccctatctctactaagaatacaaaaattagctgggcagggtggcgggcacctgtagtcccagctgctcgggaggctgaggcaggggaattgcttgaacccaggaggcagaagttgcagtgagctgaggtggtgccactgcactccagcctggtcaacagagcaacactctgtctcagaaaattaaaataataaaataaaataaaataaaataaaataaaataaaataaaataaaataaaataaataaaataaaataaaataaaataaaataaaataaaataaaatagtaaagtaaaataaaataaaggcaaagagatcaatctacatcaccaaagcactgacagcatctgctacagtgactttggtagtttcttacattctctgagcctcagttttcttatctcttaagtcagaggaaaatgacttgtttaaaaaggcttcaatgaggtaacacaagtaaagcatgtattgagattactacacaggaaaagcagttgctgaatacaattagtcaactggtaattggtaataattatgtaaaattcctataattatagggagcgctatacaattattatatataattcctataattggaattaccaataggctaattgtattcagtaactactcttattgtcctcaagttgagttattattgcaagccctgagggctgaataaacatgcaaactaaactgacatgtagaattttatttataacaatatatgcctaaaagaagcggtttatttgcacaaggaaattttggaagctacagataattttaataatgactacagaaaactatcttgaagatgtttctaatgtttaagacataatagcataagcctttataaaatgggatactgttatgtagttatagttgtaagaatcagtgtttaaaggatgggtttgatgaaattgtactactctagttcctgtgcttctaataaaattaaatctgattaatacagcaagtaggtctttggtgagttgattctgatgctgggagtgattttcttaattcttgctcagaaagccatccatgagaattaaatgagatagcatgtacaatacctggtatagttactggtaagaggttttcagtagagaccaatctcctctttgtttaccttctcatcaagagaggaagaacaaggaaaattaggttgcttttttgagaaaatactttaggccaattacaattatctgaaagtagaatgaatttctaggttaggcaagactagagttaaaacgtgggtgtgcagggctgacctgccagggtactctgtatggaagtacatggaaatgtatgcccaaatacagcttcatataattgttttgatcatacacagtttccacatgagattatatttgaatgactaattcagcaaatataaaaaaggagaaaaccagtggacaagatgattcctaaggttcctttcttcctggtctatgccctagtgtattatgaattgatattcactggaacacacagttactgctggagattgagttataaaaacattcaaatgggttactccattatatctacttaggaaatttttttttaaaataactgatagatgttcagttatgcgaaacgaaaggtatttctggctacccctttatagttgtgtacatgactgcagagccatcatttcatgcttacttccccacattcatgtaccattttctcaaaggaaaattattgaatgaacttgctagttttgattctggggtttgttttaaacaactgatatttaaatccacctagtcctctttagctgttctcctaggaactttaatattaacaaacagctgaacttatacattttgtaaaagagttcagacaatgaattcattcttcttgaaatgcatggaagtacccaggtgctagctacacccaagagccttttctaaatacaaaaaggattgacaaaccaagcattcatcctgtctgcgtccaacagttcggaatcaaaccatgaacttgctgttcctctgtttgtggttagcttgtttgtatatttttaaggaagatgattcaatgcaagaagtagttttatatagtacgttaagtaaatttcctatacgatatacttaatcagaaaaatatttttgaactagagctcacagaacatatgattacaatagttttcagaaagcaaggggctaaatgaggatttctcaaccttggcactattgagattttaggttaatttatctatggtgggaggcgtgtcctgtgcattgtagcatatttatcagcagttgtgacctcgtacccactagataccagtagtcccccttctcagttgcaacaaccaaaacaactatagacattgctaagtgttctctaggggtcaaaatggctcctgcttgagaaccacagtctagatctggtagttgcatattgaactgacagtccccaggattgttgtggggatcaaattagataaaacttgtttatattttttaaaaagtaaaactaatacatatagttacattacacctcttcttttcatttgttactcatctaagattttttgagccagatgatggagacccataaataaattaaccttaagaggctcaaaggtttgccaggtaaacaaagagttagaagaaaaagagagatcatgtcagatgtgccttaatgaatgtgtgtgtaacatgtacaaaaagttatgggaaccccaagaaagaaaagactccttttgaatgaaatcagagaaaaccaactggaccatacagttgaagctctataacaggaattaccaattaactaattgtaactaaatactcttttatacaatgtcatatattcatgtagtttttaaatctagaagtagttaaggttcataattgtcatttctcagggacactactgaagtggtatcaaatctaaatgagcaacttaagaattgaagttgtcagacagctgttaattcccctttttcatacctgctccaatgatagccaacaatcaaacaaaaataataaaataaaaacgaaagcaaaaaatacaactcagatttcactacgtacagcaataaatatcagagacattagggaataataataggtcaaagcagaaattcattcctcagcatgttcttcaagtggaagaattaggtctgttttagttctgttgattctaaaagaaacattcaggctatcaagaaaacctgttttaaactctaaatctgacactatagatagatagatagatagatagatagatagatagatagatagatagatagatagatagatagatgatagatagatatagatagatagatagatagatagatagatagatagatagatagatagacagatagatagatataattctgcctaagtaattatctgctggtaccaaagagattgacaaagagattcactaacctaccagaatttcccaaccttgttccagggtattctacattaaatactcattaccaaggaaattccacataaaagctgtcatgcttgatggagccatatttacatgaaacgttgcagcattttcttctttaaacctcttctacaatttgaccaattccatgttccagggagtactcagaggctgattaggacatgagttgttagcatgtgctgcactaatggttatgagtcacatttgttttggaagatcacccttaaagcctgtcactcatgcttgtttatgggaaatacaacaacttaaacatcagttaacaaatccccatgaatgcatggtcatatttgagtgcttctaacaaatgcttcctttcatttctcccttgacagccctaagaattaaaggctggtagagcaaactgggagacatccatgaacatttattaaaggaagcataggagagtatgataactgcaaagccagctgtttatattattggtgtgagattaaatttcatcagtcttaaaacctgctttttaccactagagaaatcaatctgccatatttaaggttacattaacgtggaacattccacgtactgaactgtcacatgcctttaaaataaccatgccatgctgttttttttttttaaaatcattacacatgaaacaaacagctgacaggtggggatctattggtatattcaagtttttcatgtgaaaatttcccccaatattagtggtaatcacaatttgattatgagaaacaaacataccatatataggcagaactatatatcagtagcctttatatttgacagctcactgtaaaatccatactatgattcagtgaacatatttatgtcttatatctgggttgatctggttgccttcagctttcctcacttgaaaaaactatacttaaaaaactgtaatttaatgttaaagttaattaacacagcaaatacttattgatgacctattatttactgggtactattttcggtgcttgcaatgcctcaatgaacaaaagagataaaaacctctatggtcatgctgcttgctttagtgagatatatgtgtgtttgtggggtggaggacatgaatgtgaggcagacaataggctacaaaaataataaattatctagtattttataaggtggaaagagctatggaaaactgccccatttgttcctcatctgagtatacccaaaagttgatctttaatattttatatgagtctcctaggttctaaatgttagaaactaattaaaaataaattgaaactaaactaaatatctttgtgatctctctggctagaagcctcaggaccagtcctcactgtttactgatgaggaagccgaggcccagagaattaaacgatgtagccaagatttcaagcagttactgtcagaggtaggaccaagacacacaacctccttctctagtgtgtttttctcaatcggttggcatttaacagcaagtgttttagttgaaaaaatttatttgaaaatctgtttgaaacatgacaaaataggaaatacctgcttattccctcactgcagagtggtcctcagcagaaagaagattttgaagtttatgaattatgttcagacaagacccttataaaatcactctcctctctccagtggcagaagcgtggcccctgactcctcacccaccttcattcatctttcgtattccttgaaaattaccactgagtattttccttctgcttcctgcagcaccagcagaaaagatgaggatgcgtctcttgattgccattacaaatctctttcttatgcttgtttccattcttattctgcacataacttggacttggccatcattcttagagctcctctaaattgtttgattaaaagattgtttataagtccagagtcagaacggaattgaaaaggcactgcacattatgatggagaggaataaactccagtcaaaagtcatggcttctggactcaccaccctaaggcagcctcactggaacttgcttttccaactgtcagtggagttttagaattttcctacttgcaagcttgttgtgaggattaaacggttaagagagattgtgtctgttatggaattgtgaaaactgtaagttgcagtccacactgtagaaatcttagttacctctgccctttctttctctagagacaggttgctagtggaatagacaagtttgccattaatttgaaggttgcattaagcatatattatgttagtgaagttggtcttctgaaagttggaagggacctcagaggtcctgtattagaccaactgtggctgttccttagaataagctggaagttttctgaaaaatacaaattctgaagcctcatacatagagattctgatgtggaagatctggaattgatggcagcagcggcccatctggagccgctgctgtgaagatgccggctgtagtgggggaggtgcggctgtggttgtgccctccacagagctgccaggtgggaagcctgacccttctgagttggcaggtctgaagcccagtgctcttcaggcacagttgcagctgcccatctgtgcctctagacctgggcatccccgtgctctcgggggcccaggaagcaccccctgctcctgcaggcttggaagtgcctgctatcactccctggcctctccctgcacctgcacccagcacccgctccggggtgaagcaaagtcatggccaagcctggatgctgtcatgacctggtcaggtgtgcacacactcggagcagtgctgacacaccagccccctggcacataggcactctctggactttggacaccaaccagcatgggagggagactgagagggcactaaggggtggttcagcgcaggcctgcaggcgccccttggcatgaacagcctgggtgctgtggatgacatgtagatggtggcagaaggcagacaggctcctgggcagaaagaggccagtccccagtgaagctccaccttcaagccagggatggccggaagccttgtggctgagctatcagttccaggtggagtccttggctgggagtgagaacttatggtgctttatccaggccttcccatagccacccatggaccaataagcacacccttcctcccttctgatctcataaaatccctggacttatccaaactcgggcagatgtcgggatgacctgcctatggataagagctacccacttcaggtctcctgagaactgtactgtcactcagtaaagtatttcttcaccttgctcaccttccagttgtctgtgtatctcattcttcctggatgtgggacaagaactcaggacccacttaatagcaggactgaaagagctgtaacacgaacagggctgagacatgccttccctgcccaccacattgtaggtgacaagaacagaagagctacagccctttggggagcccagacctgtgtgacaccctctttgggggctctgcggtttctgtcatctccatgctcccaggcgtcaccacattcccctcgtccagatgcagttgcccacggtggaagccatttgcgtacatcagatgcagccgcaggcttgcatggagctggtgcctgtgctggtgcctggagctgctcaccccaccacggcagctggtgtacctggctgtacacagtggctgaaccccatgcttacccactcacgtatccctcattgctccacgcctggcttgcccttggcaggcatggggtccaggctggtagcgcaacccgagcatagcctaccaggccgttggcagaacaagcccattgggcccgagcaaaacttgggcaaatgtgccaccagccacaaaaaggaaacacaaaagtttccagctggaaaagcaagacctgaagaatcctgcaacagaatgatgctctggagtgttttctgtgttaggtgtgcttgtttgtttgactaaacctccaaacatgagtctgaagattaaccagtttgggaagccttgcttcagctttctactgacattaaactccttctcctctcccatttctgtcttcacttagaaatggaaacccactaattactcaagatcttaccttttccattcagtcaactaggcccttgcacccccattactttgcgttccaccttgacaattgctattgccaaacatcggcattaatctattttgacatcttctttccacctgctgccctctagtggaagtgctgacaagcagcaaaatatttaactgggaacagcaggaaagtgaccagtttgagctggccagttcacacaagtcagcgcaggtccccagcatgatgtctacagactacagctatgccagaaatcgttaggatggcctccagctgtttggacactatttgcacacaagttacatttagagcagaactttgtaaagaccctggcatttattcaagggctttttaaaggtttcaaaaatctacctggaaaacattacccttgggatatttttgtttctttgtccctcattttcttcttttgtcatttacccaaattcttcttcttgcaaaagaaggtggttctttcctgccttccctaacctttgaattttccaaatcttgcaaaaaataaagatatatatatctttaaataaagatatatatatatatatataaattcttacagtttagaagcttccagtcaccaggtgaaaggaattcacatgaactgaaaattgacaatgtaaaggacactgtgttctcctactgttcctccaagtctctttgcggtccgttagtagtcttcttttttccaggagacactgaagttaagagagtttaagaagattgtagtatgtcacaaagcaagtggaaaagctagcactagaactcaggtctggctgatggaaaacccttatgtattttttttaatgtgcttctttggtgtttagtgattatttagtcttccgtgaagtaataaataataacttgcatggtaaatgttattaaggctcgaggtactaaatttatagcaaaagtcattcagcttttttttaaatgaatgtttaataatcagtgtgtctctgcataatctccaattactccttttagcagaggaacatggcaggaatgcaggtaagtttgggtgggaggaaaagacagcaaaagccacagcactgatgcaaagttgagactagatttcacagggcagatgccgtatactccctcaagctttgaagaaactaaatagttatctatgttaaccaatagggcagaactcgtactccaaacaccgacataaaccgtgtgtgtgttttgtgtatgtgtgtgtcttcccccacagcattctgcacaattattaaccctttttgtgtagtggtttttcataattttatccttgattgttaatatcatggtaagtgatgtgttataaatatatttttccttaagtatcataaacaatctaagatttcatttggctgatttttcttttcttagtattgcatatcattattgctgttagaacactcatacagattattcagcttcttaactagaatgtatacacacacacacacacacacacacacacacgtgcatgtacagaactgccttctttctctttgatggtagaaaatacagctctctatagtaagcaaatttgctttcagtctcagacatacccttcattctctgcatgactggtaaagagcggaaagagtaatacttaggatctggattccagttccctgttctctgaccatttaaaaattttgttaccttggccaggtaaatacagttctatgaacgtcagttgtgcctcaattgagcaggcttgtccaaaggattcctcaaggatgaggtatcctttcagctgtatgagctgaaccttgatttgtgcaatagtttaagcccctgaatagtcagataaaaatcatgttaattaaaattaaatagctattggtaggatctggttttccactggcttgcatgaatgatgttttgccctcctttctgatactcagctcagaggattccttccattgggttttctttcttgtagtttttctggttcataaatagcctatagacaaacactaaactgttacaggtaaaaggaccctagattaagccttttataaaacaaatagtcctgtgtaaataatgacatcttattttatgtgtgtgaatttgagttttaggatgtagggcatgtctgactagatagctaaaggctgagctccaggcagccagctgctatccaatctccacacctggaatgttccaaaaaacctcctgtgttttctttctgcagctaagcactgatgagcaggatttaagaagtacagccacacactttttgctgcacgttttttaaagtttgttatttttgtcatagattacttgttttgaatcaaaaatttttaaagaaaacttaatctcccaaattttaacccccttgaagtttcaggattccaaggaatatttttattttaagatgcataaaatactcagtacatgtacaaaggtaatgcttataagaaacttagaaaaaaaaaaggagctagtaagattgagaaggggaagaatatctaagctaacattactaacctggcaactattataggtggctggatagcatgaaggcataaagctgaaggcagttaagaaaatagactggatttgaatcctggctctacctggattagttttgtgacctcagagaagttgcttcccttctctgtgcctcagtttcttcatatgtaaaaggagataactatagtgtctaacacacagaattattgtgaggattaaataagttaatacatataaagaaagtccaaaactatggcacacaaatgtttaatatatgtaagctattattgttataaaactaaagaaagagaacccagaagacattcagtttggtgggattcagatatatgttttcctttcctcctcctcctcctcctctccttctctaaccccactatgcttgcctcccaatctatccctgactcctatttttcttcctcccaacttaagaattgtcactaaaaatatttagaagaaaagaaaatgtgcatacttcagggggtgccaagcttttgggtaaagtacacttttcagctaacatgactgtatccaacagtaatgggctttatggcaagaaaaagcttttttctcaataaatgggttttaactttgtaatggattattctctttgcatgggtaattcttctggaagatggaaattggctcgatgataagataggacagttggatttagggatctagattaagggactatcatgtatgcttttaggagagaagtttaatctgcaaaacctacttgtcttatttaattaattgttgctcttagctgctcaattttgtacaggtgacttgcatgaaagcaaaatgtatgtcaaaatccaaaagcagagtgaagcctcgggacttcagtgcttttgggtgtctttccagacctctgctcttcccccaccctcaccaaggccccactgacctcaaagggcccttcttgccaggccgtgaattacgtctgagccagagggctgggactacagccaaagccaaatgaaggtgcagaatttaggactaaaaaaagcctgagcacgtggcactgggtatagcagataaatttgttggagaaatggtttataaataacatgaaaagggaaaggggatagagggtcaaaatattgagctgttgagagttgttcaatatttgaggtcagtctcaccatttttaatactgaacccaaaagtaatacacactgaaaaaaaaaaaaaactcactgaataaaattaactacagctgggcttattttttcttatcaagacatttgtaagtttggcagcaagcatttttaaacaggatctctattatatgaaataaatttaaaaacatgtgtctacagtcaggacaaacaagtgaacaaaaacaaagcaaaagcaataaagaagccccatgaaggcattatgcttttctgaggacagtataaggctaggatactgcagaaactgaaatacttagggatcttattgaaatagttttcttttcctccaaacaaagcaaccatctcagagggatagatgggctaaaagacaaggaataaagtaaacagaagattggtaacttgggaggttttcttttcccctttctctttttggttttgatttgcttttcccttgttaaagccagaaaggataaattttggtccagaactcccaagaccagagggtcagggaaagccaccccgaggctggaagctatgaacttatcgctagtctaaactccacctccttcttccctgggagtcctgcacaaatataactgcctgatctttctgtttactggcaaaggttttgctcccttctctttcgtatcggaatgtgaacttggggaaagatttggggttttttttgttttttttttgtttttttaagaaacagagacttgacttattcctcccacaaactcttaccctggcacagggagaccacaaactaagtgaaaacaaggtaagaagcttagagaaatgggaccatatgccctccccggagctgaaccgtgttccctgtccaccatcaccttgtcttcccatgctactactccactcctgtctcttccacactctgggtcacatgtctaccccttactgtgagttataatcgcccaggaagggtaacccattgactgagggccaagcttctgataagtgaatgaacttgtcttttctcctggccagatatctgtctttgccagagagggctgagtcagggagactaagattttcaaggtcaaattgtatattgtttaaaattgtgaaaatttgctttgtgcattgaatctcattttcaaaataaaattatgccttaagtcagatcatactgatgcagattctgcagatgttaagaggcttccatgattgtatttgccagctgcaggtcaggcagtggtggatggtggtaagaagtaacctatacttttggctgggagctgtggttcatgcctgtaatcccagcgctttaggaggctcaggcgggcagatcacgagatcaggagattgagaccatcctggctaacacagtgaaaccccgtctctactaaaaatacaaaaaaattagccaggcttggtggcacacgcctgtagtcccagctacttgggagactgaagcaggagaatcgcttgaacctgggaggcagaggttgctgtgagcgagatcgcgccattgcactccacactccagcctgggcagcaaaagcgaaactccatctcaaaaaaaaaaaaaaaaaaaaaaaaagtgacctatagttttgcagtagaattttgaattcaaactcaggctttatattttctccaaagtaaattgtattttgttcattttaatccattggttgactctaatgagatctttctgactggaaattctgccctttttttcctccataactgtattaccagttatctctcatccatgtgtttgataaatccatatgaatgtctttttttgttttctaccaaaacctttataacaaaacaaaattcatagctttgtcaactacacttgaaaattatgccccaggcttttcaggattctgtaattaacttattgagtcatttgtttaaccattggtgaattcatttatctttactcgggccacagtaatgtattttacttacaacatattatgagaaactacatcacctgcttcaccgaaattgaaaaacattagatgaacaacactgccctaaaccatatttcaataatcctttcatgaaaggaaaggaagtacatttcctataatgatttgttcttagtgaagccatgttgactccaagtgacctgttgtttcctttctgggctcatagaaataatctaaccattctaaaatattgatggggattcaggtcaaaggtatagttttaaaaattcaccatatttaacctgttaaacattcagtatctcctaccttctgtcttccaaaaatccaaagaaataaccatttattgttccgtttatgctttcagtgtctaggacatagctaatctgatactgaacatttgaacttatcgttagctttgaaaatatgccctattgtcctattggctttatactaaagttttattaatacattccctcaatagtctccagtctttgcccaagaagaagaaaattctgtaagagtttctttttaccttcctttcttctctgagtggaataatcttttttgttgtcttcatagtattttagagttttgtgagatcagacaaaatttacctcagcttataactttatcttttaagtggaaaaactctgaactattgattattgtgtcatcttgaaaaaatagtctatggaatatatataagtagttgtgttatttttttcagtgttaagttgacctttttcttttagtgcattgtgaatatttaaaaggtcatttgtgcaacatataagaggattgacaggtttccatgcatgatgcttaatgtggagatgatttctttccatcaagttattatgcttggaataagtaacacatcttaaaattacaaccttgatgtagcaaatcatcagatgggttaccattacatggaaagagccagtgaaataaagaccattaagttcaggtagacagagatggcggtgagaaattcacagccaaagagggccatatggaggtgaaaacactggtaaatggctctgggaccctaggagtctacagtaagtcattgggaagttggagtggagaaaggcaacattagctaggtatttcattcattcctccataaatgcttattgggagcatgttgtgtgcctggcatcatcctagcttcactgaaaagaatgaggaacatataaaatgtgaaggtgagaataagtgagaagtaattgctctttactctcaattatagctgggcaagtacatatatgaatatgcttttgtgttctgaacacacactaagcagttggtcaaagtattaagctagagacaacttctactttcaaatgtagtgtttcaaaataataataataataaagatttcaggacagtttacatataaccatttagagatttaaggattaaaatcaggagggaaggagaaatgtctctgctggggaaatttttttaaactagtgttttctactcagctactcaatgtgatttcttttattttcttccttccattgcttattggcatttattgtggggaagactgctgtgttggcagcatgagagagatgggaatcaagaaaatggaaacaccattcaatattcaaaagccactatccccttaaaagcaaccacagatcattcagttttgccacatactcagattgcacactaactggaggatgttaaaaagtgttctattacaaccagttatccagtttttgccacttaaactctgctgtgagaaatgtgactgtagagcagccttaaaaagagatcatcttgatattaagcagtgttactcatacatgcttgttgacattctaacaggtgactttgaatggatcttcaggctcagaaacatggttgtgtccctagaactggtgaggctggaacaaggtgtacagaagtgaaatgaccacttgctttctctattggatttctttatccagctgtgcaattgtttcagggactacagttgattttcctgatgcaagcctagcaacttgtttttcagttcagcacagtaaaatatgaacaggagagaactccctgttggccacccacctcacaatctttaaaagggaactctgtacagaagcattctgcattaggcaaatgtacacttctgcaatcaaaatgaaaaacacttgagctgaatcgtttttcgttagctttagtttccagccctgattaaaaagaacacagggaaccctgcaagtttaagcggttttggcagccgaggaaacagctgtgacattgtcaagggttgtctgtaggagctgtgcaggctgctgacagcactgataatgcccagaaatggggcagacgcttttcgcatttggtcatcaaaggagtggcagcagctaggttcaagaagtgaacttttgaccctgtctgagacaactggctctcgtggatcttgttctgtcattctccagtctgattttctctttcagaacaagtgggtaggatctttggtttttaaactgtttgactgttattaaaagtaagctagttcttatagctgcgattggaagggatggaaggtgaggaagaagagctggtatttcccactatcctgcaggggtggggaaatctatcaacgactgttccactaatctgcggatgagttatctagggaatatcatgcagttgccaaagttttcagcatctaaaagcctccaaagttctctctgtgagggtctacctcccctgtctccagatccttcccatgcccctcagactcagcacttgtccactgtccttgctaccagggaatccctctgcagcccccttaccctcctgcccctcccaaaagagctccagactttgacctttctcttccacctcaacatctgtttgtgtcttaaactgatgtccattgaaagaaacagataaactaattaatgctgagatatgacttatgaagtattatgaatgtgctaactctctcaggggtatgtgcattttaatagaggaccagcagtccaaaggccggtctcactccactgtgcccctctaacagcaccgagtctatttccaggcagccagagaccaggcctgagaacttgccccagaccaccagcgtccccactgagaaagcaagcagactcaacagtttttcagtgtttcagggagcctgcagcagcaatacagttccttcaaagggtctgtggattctctcagctttcctagtaggttgctgtggtagtttttggagcaaaagttcacgatgtgaatcttcacatgctgctctttgtgccgagcaggtgcttgcaagctagttctgcccctatctgccatcttaatcctaacatctcccatgtttttttaatttaacttctattttggtttcagaggtacatgtgcaggtctgttatatagataaattggatgccatgggagtttggggcatacatgatttcatcacccaggtaataaacatggtttccaataggttagtttttatgtcctcacccgcctcccatcctccacccccaagtgggtgccagtgtctattattcccttatttgtgtttatgtgtactcagtgtttagctcccacttataaatgagaacacgcagtgtttagttttctgttcctgtattagtttgctcaggataatggcttccagcactatccatgtggctgcacaggacatgagctcattttttatggctgcatagtattccatggtgtatatgtatcacattttctttatccagtctactgtcaatgggcatttaggtttatcctgtgtctttgttattgtgaatagagcctcagtgaacatacgtgtgtgtgtgtctttatggtagagcagtttatattccttggattgttgggtaaaatagcagttctattttaagttatttgagaaatcttcatcctgctttccatagtggctgaactaatttacattcctacaagcaatataaatattcctttttctctgcaaccttgccagcatctgttatttttttgagtttttaataatagccattctgactggtgtgagatggtattcattgtggttttgatttgcatttctctagtgaatagtgatcgtgagtattttttcatatgcttattttccatgtgtatgacttcttttgaaaagtatctgttcagggacatcattcctatgaaaatgctagttaattatacaagtattacttgtttccaataatcgattttttaaaaaaccttataatcaatattgcattaaaattttcagctgtgtgattccttatcattttcttggatgcaaatgccttgtgtcacgtactatatctcataaatctatattgcatctaacaaagtgctttgtgtaaagtaggcaattaataaatgcttgtttaatgagtagatttgtttttgttttattttgctttctatgttttcctaaggatgtggggcattaggccaatggaaactgtctctcaaaagttcttatatataaatattgatgtcaaagtcactatttttgtacaaataaacacatttacctaatttggtgagcatttatagagtcctgcctatattcaaggtccctgtgctgatcagtgggcaactgaagaagtatgaggcactgttactgctgtcttccttccctaattgggtcctataccttatcttggtacagctacctcctaaggaggcccatctgtgctgttgagggtacatctgaaggcagtgcactggaatgtatagcctaggactggaatttggagtgaggccctgagagatcatacacatttttcacttgtgggggaatgtccttaagtagaaatagatggtgatttcagatatttgatccaaacctaacttcctcatttgaattgagtatgctaataactattcttgaggctctggaatagtgatgacatttcctggttgggaaatcagatgctgatttctgaagcagagttttaaagttgaaagatgaaaagggaacaaaacaataaacacaaccttagactgaagggtcatttttctagtccaacttccctccacctagctgccacccaagattgtccctcagccatccttagaatattaaaataaatccattgcagtgctcaaatgacttgtttctatttgaaaatccttgccattggagaatttttctatatatcttaccttaatggctctccacgaattttgtcaacagtttgtcagcaatgtactcatgaaaatatctcatatctatgtatattctatcactttagcctccttgacttctagaccagcagttcccaaacttttcaaatgtgaccccttttagtatcaacttctgtttataaaagtacaaaagccctcacatcttatactttcttttatgcttttatttattgagatattagacaacacatacttgtaggtgacatggattcttagatctaaataactccactctccatggtcactgtcacttcaacacaggttgatgcagtccttagtttggaaaacagttttggcataaataatcccaaaccttcctatcacttcttggagcttttttcttcatgctttccttgcatctttcttaaaatgtgaagactacattggatatattattaaaataatgtcattattagtgctatgtttaaagctgaccttttcttcctagccactgatatagcagtgccaactgtggactctctttagaatgaacactttagtaataataagtccttagaacacaaacactgtcacttgtaaaacacttttctatacttggtaacctacacagaacagcggttcccagactttttcttttttttgtcttgtgggtcctttatatattcttacaaattattaaagactccaaagagcttttgtttatgtgaggttttgttattgatacttactgtcttagtaattaaaactaagaaaattgtaaaacaacacatcccattagctgtcagagcatcatcatgtcttgtaggctctggaaaactccactgtacactcatgaagaatgagtgtgaaagagccaaatagtagcttaatattattataataatagtttaactttgtgagctcaccaatataatacatattcatgacacagtccctaacatctaaaaacttacaatctaaggcccaacataaatactaatagatgatgctaaattctggcttcacagtgcttcctacaataatactaaaaatatatgaatttagacagaggccaaaatgtgtttattaaccacttggctttgcttagtattttgttacccaccttggagaattgcctctgctgatttacactttataagaagcagccctatgaaattttttatcataagtttaacaatgatgtagaacatactgtttcattttataatgatccttgggcaaaatgtataatatctgtgggagaaatgctcaatgctgcagtaaaaactatacttctcctcagaatcaggtatgttcttatatggtcagtataaatcttataactgtgctttctgatctcctttggccaccaggaagacaggagctgacaatccaacttactataaattcttcagggtctgatgtcattatttctataagattttccctggcattatcttatttctcaggtctcacttttcctttgttctgatttatttttcttaatatgttttattgtgtatttgttaatatgttttgttgtgtatttaattgccaatggggatgaatgaataagtgagaaagaaagatacttgatccatttgagtgggactgcttgagtacctggagtggtgcagaccaagcagggtaactgtatcaggtttcattaatgaaatgggtcttaagtggagattaggaaggaaaggaagtgggttgctggagaggcggggtgttttatgtgacagattggctgtaataaagatgcagctgtggagtgagtgagtgatgtcctgagcacagtaaggagatctggctgacgtggcactgcacctcattgccttaatatcttttcatttgattgaagaggcagctgagggataggtgctcttggaaagtggagtaaccatttccaattaaggaaggactctcacttcagtttctaaaataaattagaagggagaaaatatgaagtctgagagatcaattaggagaaagttctggtgctacatatagaaataggcttatccgcatatgcaggtgagagtacgaagaagaatctgtgaatggcagtcattttttgtagctggttccaattaaaattgattctctataatgactacttattggctgctgctcaccaggtctgcctttttcatcattgtctgcagaacatatcacagtatacagcatagagtaggtgcttcataatgtgttaaatggatgaaatgggttcctacctccaaaggagatggaaaaaaaaaaacaggcaagtaaataaagtaaaatatgtataaattgctttaagaatgttttataaaaaaggacagtagcccaacagcattcacagtaggctggctggagtagcagtcattgaagaaacccatgaaaacagcggcagaagcaaatgtgcagctgctctgccttttcacactgtagggcagcacacgaatagtcctggagcaccagggcccttagactgtgggatttttaagttacctagttggcacagcattgactcctcctctggtgtgattaggggccaggatacaataaacatatgttatgttggaactttgatgccagcctaaacttgccagttcagtgtttgtggttgcaggtagtatcagctcctctcctgatatgattgagagactgaggtccaaggcttcaggttgaacagaattgatggccctaaggattgggttagaactcttccaaagcacttagcaggaagccagtttacttttcttggatgccagcttccaagaaaagatcagtcttgagcaaaatagtccttcactctcagctcagaagcctaattgagagggtatcctataagtaacacagcccactctgctagtaacctgttctacttcaacctgtaaggcccatgaggctagccagtgacatcactacaggacacagtggaggatgtttaggaatggctgggtgatgaccagggtgcagattgtgtttactcaaggctgattgagaaatactgttttcagtggtgtgcttataaatgtttaacagtggtgggtggaaggggggctctggcttgtagcatttttctagtgcccatggtgtaaatactcccaacatgaccaactttaagttaccaatgtgattgaaagtagagtttggaagcgaggcacagtagcccactgttatgtagtatttttgccatacagatgcataagagacataagtaacctgaagaacatagataattattaaatgtagtaaaatgatcatgaagtgacagatcttgagtgttttatcacatttgtttttaatataatttaattttaagttgccataatttaatttgtaattaagactatgttaataattggcttatggaatttctgagaattcaaaaaccagtgcccataggtggatccagtacaccactaggtaagaacagcctagaagtacttctaggctcttgttctgaaaggtgccaagactggcatccatggttccagtgccagggtcgaggaaagacttactaggtcctgcagtattgctcccaaatctctttcagtggccagggaaattatcagcctgaaggcaggctgaatggcttgcttacattcaggtcccagtatctacgattgacaatcggcttcatttgtaagtaccagatagtgcaactccatgtatccaggaggctgggaggtactgagagcagactgatagtgtcaagagacactgaaatgactgccagctctctcctgccatatccactactaagtgagaaattcagtgacatagtcactgaggactccaccactgctgggtgttggggagggcacactgagtatttcaagacaatccgggtaagatttttcttggagggattcaagtacaaaatagttaatatgcagaaatgaagcagaaattattatacctcagaaatgagtcagataatactaaagaaaggaagaaaggaaagcatgacttgattcatgtctttaatgatgaccaaagaagttgggtctttaaagatgacaagagaagactgatcaggtagcagtgaggtggaaggggaaagatgagagaggggacattcctggtagaggaagcaaggtagacaaagtgtaggaatgtgaaagagcataatgtatgtaagtattgttcaggtgacttcttgggtacctagatagtagagagaaattagaggtaagaatggaggaaggggagactcagggccaggttgttgagggcattttatgccatgctaaggagtttccaatttttcctttcagtaatagcaagaaacttaaaatgagcaggggtttgtgtttttgaaagaactgggaaaacacctctgggcaatccattacctggggataatgggtgaaatttcccaagttagtgcacaggctgctgggtagggcttgaggctttcctcttgcctcctatttcaacactgtggtcttttaggacttgtcctcaacatgttcttaaaaggaatgtttgctaactgccaaaacagtagtcttcatatttattctgttcctttccaaaaggtaaattgaaaaagcaacataccctcagccaagagaattaatcttttatcacctaagttactgcccactgcctttcagttttaaagttaatttagtgtgcataaatggctatgagcccctggaactctctttatgtttgcatcttaaatttaccagaccctccttctgcctctagttccagaattttctttgtcttattttcttcaagaaatgtatttctttaaattggattgcaaatttggaatacacacagtcaaagccttttaaaaccattcttttaaaaaaggacaagtttcttgagaacatttttaaaggaaaaagttaaaatagatgtcaatggaagatgcaaatatgaatataaaatatgaaaagcatctataggctggagcttctcagtagagctctacttcatttaaagtcatattatctggcaccatttcaaagcttttggttacttgattttgtagttagaaaaaaagtataaagttgaaatattgggctctttacatgaccattttgctagtagcagtggatgaagcttttctctaagagatcaatagctttagtgtaaacttggtcaataccttattggaagaggtgactatgtcagattaggtagaaactttaaaagccagcaagtttccaaatgtccttctggaattggcctcctagggccatgtggaccagagagatcttatcacagaagtcataaactgatatccgtgagccaaatctagctcatgggcatgttgtttggcctacagcacattttttttttttttttttttttttgagacagagttcactctgtcacccaggccggagtgcagtggcacaatctcagctcactcaacctctgcctcccgggttcaagcaattccctggctcagcctcctgagtagctgggattacaggtgcccaccaccacacctggctaatttttgtatttttagtagagatggggtttcaccatcttggccaggctggtcttgaactcctgacctcgtgatccacccccccgcctcttggcctcccaaagtgctgggattacaggcgtgagccaccacgcctggcccacaccacatttgtaagcagatgaattggttatttttaaaaatttgaagaatttaacaacaaaaacaacaacaacaacaacaaacttttgtgtccagcttctttttttttattgtcccaatagttaaggacaatcctgggcctgcattctttgaacagttggctagacttaagtagctgctgccccttttagatggggcaaacattctctactttttcacagtccccttcaagggtgcttcagccatttttgctactcacttgtcttcaataaaccaaggtcatgtttaaaagattaaataacagttattgcatgctcaccaaaccgtcacaaggaaccagacttgtgtaccagaacagagtcctggagcatatctctgttaggctagacatcactcttttagttatgggatcatggaaaggtgcagaaagttccagggaaggggtcgggagggatttggtgagtgaggcacttggaggcatgggtcaatagcttttcaccagctagcatggaagtacttttagtgtttaaaaacctatggcacagtgggatcttctaggaaagtagaccctggagatggagattcacatgtagcacatttattaggggatgccactaggatcaatatctgtaaaagagagagaaaggatgtaagagtgggcagagggagaagttgagctgcaaagcaggcccagtgccagcctcaactggctccataaggagctctggctctggaatgcccttttatatttgtttcccatgggaccaggatggctaggccattctactctgacatgcatcactcactgaaagtgggaagagtcttgctcttgagtgaggaaatcccctgctactgaggcaatccctcaaaggagtaagaagtgaaagctcctggcctggagcacctgcaacatctgaaacaagaaatccttcattgaacaggatctgggcagcacaccagagtgatcacagtcagcagctataccagtgacaacagatgaatatcaactctgcctttagcccctagggtatgacacctggcctaccaaggctgtgcctaaactctttggactgattcagaatcaagcaagtcctagcctaaagagaggagtttaatgtcatgctacgctctagcccaatatttgctgacttgtaattcagtcattaaaaaaattctttttatcttcacatagttttagattgtcaaactgttaccgttctgtgtccagaaattaaaatctattctttctattctttttttttttttttttttttttttgtgacggagttttgctcttgatgcccaggctggagtgcgatggtgcaatcttgtctcactgcaacctccgcctcctgggttcaagcaattctcctgtctcagcctcctgagtagctgggattacaggcgcatgccaccatgctcagctaatttttgtgtttttagtagagatgaggtttcatcatattggtcaggcttgtcttgaattcccgacttgaggtgatccgccccgctcagcctcccaaagtgctgggattacaagtgaaatctattcttatattttattgtaacctcagaaaagaatgcttttttgaggactagagttctgtctcttttattgtcttctcctttctctttcccaaacctataactctattttgcttagcacacaatgaataatcagatgtcttaaattgtggcttacataattactagtataacttttttgcttttttttatttcattttaatctgttcatgaggactgttacccaggtatttaaaaaatctcactccattgttttaaggttagtggttccaaagggattttagagaccctgacccaataatagttatatttttctaagtggttctgaagcaatggtcacaagtaagaaactgcagttcaaaacacatcataggtttgttattttccaaattcttattaaagcattaatgcaaatggaattttcctactagtattctgctttctctaatccttgacaggactaattgctaaactataatatgatttattataattttatgtttatattaaaaatatagaatatgattgccctttgatgtcaaatactaaagatcctgctactattttagttgtgctggttcttttcttccttatctttcattcaccttttcaattcatctcataaacatttaatgaaaaacttattgtgtatcaagggttgtttattatatgatttgtaattcaaaaactttctttctctggtctgagaattttagaaacatgaaaagaaagagggagggagaccaactgagagtataaaaataaatctggcatttattaacagttaaccaatttcttttttctataataatttatctactaaactgtattttttaaattattgttttagtttttgttgcatatatttaaggtatacaacatgatgttttttataattactagagtgaaacaaattaacaaactcatctcctacatagttatcttttgcgtgtatgtgtgtggtaagagctccagaaatctactctattaacaaatttccaatatgcaatacaatattattaatgatagtctttctgctgtacgtcagattcctagacttattcatccttcataactgctactttgtaccatttgaactacgttttcacatcccctgtgaaaatgggaggggggccgtaccatttgcatggaatatctttttccatcacttaccttttactgtatgtatgtactcagatctaaactgagtttcttgtggaaaccatacagttggatcttcattctttacccattcagccattctgtatcttttttattgaggagtttagaccatttacaatttaagtaattattgatagggacagatttaagcttgccattttgtcaactgttttctatttgtttataattcttttttctcttgctctcttcttcagtgttttgttggatttttatgctgataggttttgatttcttcttttgtgtaacttctatatattttttctttgttgtcaccaaagggcttacataaaatattttagagttgtaactgtccaatttatgctgatagcaacttagcttcctttgcttataagaactctctgcttttacctcttctcccccattatatgctactaatatcccaatgtacatctgtttatattgtgtatgtagtaacataatttagttatagttgttttaatacttgtcttttagtttttatagtagaatgaacatatttacctaccactgttatagtaatacagtattctgtattattttttaccaatgtgttccctactctgctgctttctttttgtttcaattttaagagctatctttggcatttcttataaggcaaatctagataaactctctcaacttttgtttgtctgagaaattatttatcttgcctttatttttgaaggacaggattgctgggtatagccgtctttgttgttaggttttgtgttttttttttcttttttcagcacttggaatatatcattcaactcccttcaggcctgcaaggtttctgcagaaaaatcgtctgataatactacagagatttcattataagtagcaagtcacttctctcttgctgctttcaaaattctctttgtcttcaacttttaacaattataatgtgtcctggcgtgggtctctttggattcatcttacttggtgtcgtttgggcttcctggatctggatgtttattttcttcccgggactggaaaatattcaaccattatttctttgaatttttttctctctctcttctccttttgtatattccgtaatatgtatatgggttcacttgatgttattccaaaattcccttaagctatctttacttctcttcattcttttttctttttgcttctctgactggataatcatcaataatctgtttttgagttagctgatcttttcttctgtttgatttagtcttctcttgaataccttctgagtaaaaacaaacaaacaaactgtttttcctctgctttcacagttcaacagcaatcagtaaagaagccctttgtgacaaaatgtgtgtttagggaaggggtggtttccttcacacaacaagtaagcaatcagttctgcagtaaataccagtttggtgtcctctaattcaattccaacacttctactgagagatcctacagattgggggctcagtccccgagactgtcttcctcaaccaacttccaatgccaattgcaaaccccaggttattttgcctgtacttcttactgactggctataaactgaggttcccacaacccccttctgaggttcaattaatttgcaagagtggctcatggaacttggaaacacttgcttatgtttatgagtttattataaaggatattttaagggatacaaacaaacagccagaagaagagatgtctagggtaaggtcaggaagggtcatgagtacaggagcttctgtccttgtggagttggggtacacaacccttcggacatgtagatgagttcttgttcaccttcctgtaagccttcacatgtatagctgtctagaagctctctaaatcctgtactctttggccatttatggagacctcattggataggcatgattgacaatcatgtggaaatgtgattggacaaaaagagtattagctagtgctaacagactgaatggaaaacccagaaaggcctgtctgttcagattcttcctggtctctctctgcagcattctttcctccagggaatggggcaggaccttttttgaaatgaaaatcttatgacctacaatcagacaaagtaggtcagagaatttctttatggccagaggcaggggaagacttaagtgtatttttagtttctgttgcctgccttatggagaaaaaggaacaggtgaatagagggtaagagaaagtcatagagagatttctgttttttgaggcctgcttctaatgtctaaagcaccccagcattataataaaagactgtaataagagctaaggaagttatgagccaggaactgtggacaaagtaatatcacacccctctattttttttttttttttagtttacttactgtattatttatttccatgatttctgtttggtactttttaatattttctatctttttgttgaaatctcactttgttcatgcattgctcacataaactcagtgagcatctttatggctgttatttttaattctctgtgaaatcagttacctccatttcattagggtcagtttatagaggatttatctagttcttttgtttgaaatatattttcctatttctttattttccttgactacctagagctttctttaaattatatgaaatagccatctctcccagtcttgtcaaactggctttgtgtagcagaggtacctcaccaatcaacttgaccagagatttgtggtgcctcttttttttttttttttttttttttgagacagagtttcactcttgttgcctaggctggagtgcaatggtgccattcagctcaccccaacctccacgtcccgggttcaagtgattcccctgtcccctgtctcagcctcccgagtagctgggattacaggcatgcaccaacacgcccggctaattttgtattttttttagtagagatggggtttctccatgttggtcaggctggtgtcgagctcccgacctcaggtgatccgtctgcctcgacctcccaaagtgctgggattatagatgagagccaccgcgcccggcctggggtgcctcttaaacttttgtgcttattcaaaccaccagttttgttcttagtggccctcggtaggaatgtcccaagtcctaagttagtgaccaaggtagagaaacctgtccctcaagaagcagctagaaatattggggctctagatgagtggtccatcttcctctctcctcagggataagctgggagctggactttataccccactcactctgcagtccagatagaggatctgtgccaaatgcttgtgctctatttcagacaatgctctctttaaacatttactttgctctctcaaatggcaggtctcattagctgtcctggataagtgaattagctggaagcttggttatgtttctggagtgaggagctgcaggaagtgccctcatgcctgttcagactcccggagttctactaattgcctgctccatcagctccctgatgcaggctaattaatagcttaatccacggacagcagctaggaaagtcagaatattatgtatgcagtctaactccgtccagggagaaactgagagctgggtgtttttgcttgctcactcttcactgagcttggggaactagctgctggtagtgcacatgagctcatttaaaaccacttctttgttccttgtggtcttgggggacacataaatgccagtcccccatagctcccagagctaggtgatttcagagccagtctctcaggtgggagctgtaaaagttggggtgctcaatgtatggacaaactccttccaggagagattagatgcttgattttatcattggattgagctgggggagaaggcacaggaagtgcccacacactagtgcccacatacataccctttcaagctcccagaggtcttactaattacctgccccactggctcttagtccacttagtaatgctataaggaatacctgttgctgggtaatttatgaggaagagaggtttatttggttcatggttctgcaggctgtacaggaagcatgatgctagcatctgcttccagtgagggcttcaggctgtttccactcatggtagaaggttaaggggagttggcatgtagaaatcacatggcaagagatgaggcaagaaagaaagaggagaaggtgccaggctcttttcaacaatcggttctctcgtagaaactaagactgagaacttaaccactgccctgacaagggcaccaagccataaatgagagatcattcttatgacccagacacctcccacaaggtccacctcccacactggggatcaaatttcaacatgaagctttctggggccaaacaaactgcatcaaaatcgggctcccagttttagactatgtagaactttaatccttgggcagcagctgggaaagtgcaataaaacccctaccagagagaaactaggagttgggcaatatcgcctgttcactctgtactaagcctgagggaattggggtaggaagttcttgcacacctgtttaaaattgccaccttgttctctgtggtccagagataattgcaaatgctgagcctatctgcttccagagctaggtgaattggtgattatggtttggctctgtgtccccacccaaagattgatcatggggacggtttcttccaagcattctcatgatagtgagtgagctctcacaagagctgatgaagttttaaaggtgtttggcagttccccctttgctcactttccctctctcctgccaccatgtaagatttgccttgcttccccttcaccttccaccatgattataagtttcctgagccctccccagccatgtggaactgtgagtcaattaaacctctttcctttttaagttacccagtctcaggtagtttctttctagcagggtgaaaacagaataatataaggagcaagtccctcagggaggagctgtaaaagttgaggtgctatatgtgtggtcccaaccctttaacttctaagaaggtaaagctaggagttgggtttccttcctgattacaaagtgatgtgcctgggtggtgctattggtgtgaattaaccaatttcttaaacatcaactaggtgttccaaactgtgctaagggctagggaaaaggctttgttatccttattctgagagagcttatagtctgattaggaataagaaaactgacacaaaataacagcaaataacaaggcaacataatcagttgctacatgttatggtggtatataaatgatggtagaatttagaaaactgaaaggggacaggatagacaagagtggtcaggaaggctgcatggaagagaaggaacttgatttgggatagaagaaggggctgggatttgggaagacaaaacaaaagaagagggccattccagtatccaagtaatgacagatagaggcacagggcatgtattaacacgagaatagcagaagtttgatgttggttagaacttactaccaacttcttacagaactttcctctaagaattatgagtttgaaaacattcaacacctcaatctactttcaagatttcctggcaaagtgaaggaagcaaatacctttattattttacaactgaagttacctgttttgtcagttatgatctaggctgattctaactacctatgggcaacctagaacagtcaaaagagctaggaattcattcaaaagaccaaaatctgcattgtctggtagtgtgagcatgagcaaatcacttcatctccttgagccccagttttctcatctaggaatgaaaagtagagccttatctatctgaccaggttattatgctattaagttatataagtaaatgtgaaaattcttcttaaacaataaaacaatataaattttagttggtacttttgttaacatctacactagaccacgtttatataggtaatttaaaaataaaaaagaatggggaattcattcttatgtcatggatttatattttttttgtagtacaaagttaatcgctcagcagtgtttgttacatttcaagtagcaaccatcatattgccatgaaatttatttagtaacccctaactactttttttttaatgaaatagcatagaatgaaagtatagtgtatattgtactttttagggcagtagattatatcatttgtcataaagatgagtgtcgtttagtgacacacaaaggcataagtgacatacacactggtcaaaatgtaaaatatatttctttttgtggattgttgtcaaagaagattgaaagacactaattaataatatagtatttcaaatataaaatcctcagtcttcatattttgaaccctcaaattaaactaaccaaaaagataaatttcagagaaaagttattttatgtaaagaaagtgagattttgatgaaatgagacatgctaccacatattctttattttcttcttatgtctcttgctgaaacccaaattctgtcttcacttctgctgcccaagtatacaaagcaaagggattttttgtgtgtgtttccatcaaaagctacatgcctagaaactcattgtactctattttttctggtagctcttgagttgtttattttaactatcaatcaatattatataatttaaaaataaaaacttaatttgtgacaaagtaagttttcagtctgggttcaggaaagaaagggatggcatatgcaaaaatgatgtaaccaggaagaatgcaataatatgtctatgtacaagaggggtgatagaattaaggaaaccaaccaaagatggtgaagaacccagagctaagaaaagggtactagctcccaggcctgaaaggtcacagtgttctaggttccagaagtgacactgagcagtgggagaggagcaatattactagtgccatcatgggaaaccagtcttttcaggaaagagagaggcatggaggggacaggtgccaatggctgaacccaatgaagaccaagggttctgggcaatgtcatctgtaatggccaacttcctggggcacagagcagggaagacgagagtggaaaatgagtgtggagcaacaaatggggagtaaccagcaacctattatatgaatgatcatttttcatgtcagatggtggcatatagcttttctactcaaattcagtttccttcctctgtttgctaactggcctagaccaatcctgatctagcccatggtagtttactttggttcctagctgttgggtagccaaccagtggtgtcttcctgcaggaacttcttagaagggccaaagataaaggatgaagtgtcctcattgatttcatagacacaaccagttctagatcactggttcaaagagggtaataaattagtaaagtgggagaacacgaaattaggaagattcatttctgctttattgtgaactgggtcaatttttgctttcttaatattaatcttgaaaaagatatcctttgaaatctcaaaatccttttctgtaatttaaaaacaaccttaccatctgtgtcctctgtcatatggtacaatattcaagagggtgaaataatggtccagtgactaagaaaaaccttaaaggataaattggccttagtgactgtcactaaaatgtaaacatggctttaaaaagtaaatcaggaggcatgaaagggccttgacagctaaggctctcaggaagggtctagaaagacatgaagcacaattttataagtgtgatataggagttactcttctttttttattcatgtgtcatagaagggaaaggaaatttctaaaggagtaagaccagccagatatcacaagaatatacaggaatgtaaggatagcatgttcaagggcaacatgaggagtcaaagaaaatgtcctggatgccaagactagctgtgttcttgcagctgctggctcctccttggcaaacacaccattggcaatgaactgatctgatgtgaacccctctaagtccttgagactctctttttattgcaaagcttgccagcctctttacccagtacatgtactccactctaagaagaaaaaacaaaactaagtgactgctaagctcatggacaatgtttttgggtctctccagcagccagctagtggctgactaggtaaaatcatttatttttctcaagatgttgtgattctgggaatgcagggtttggctgccatgttagcctggattttctgagatgcatccctgcaagagattcactgggaaattagatgtgcaagagatttatctggggaaatgcctatgagggaaaatggagaaggagctgcagaaggctggaagagatgaccactgcagtacaggtctaatcccagtggaaaaaaaaaaaggagagaaggaatgagaaaagggaaagagagaaggagggaagaaaggaaagaggtagggagggagggaaagtcttagacatcagtgcagtgccaagaaagttttggcaaggctgatggggagtcttcaaaccaaagtcacttgaaagaggaatcccctcatcatccctctaggaatgggcctgccttggtgtccttgtcatgcaaagtcactggctgggtggatttcagagcatagcagctgagggcataggccagttacactctgccataggaggcttgagagatgcattttcatagctgccacatttgccactgaaaccttctgggagtgatgggttgtgctggaagaatttgaagatactatcttatgctccagataaagaaatgcattgatgaaggcccttcactattagatttatttttgtgtgtcccaactattatataaattcccctatcaaggaattttcagtgttttctccttgcccttagatatgtgatcttatatcccaggtttgctgagacattcctcttacagatagttctactggctcatgagtgtaatgtgtctaaatgtatggttggaaaaatgtggttattagatctaaattttaagtccaaatttccttagcctgaagtttagagtcttccacagtctagtcccaaccactttttccaaccttaattaccattgcactttatcctgtatttcaattcatttgaaatatttgctcctttctaaattactcttgcttacccaccactatctctttgttcatactgttctcttcaactaaggttaattaatcaacatgtatttattgcccccttcccatgggccaagccctgtgcttagaactgtatgttaggggacaaaacgcacatggtttctgtcttcttagagtttgaatttagtagaagaggaacagacaaatacacaggtcaatggacagtgcatgcttacaaatcatgtgacagtgtcaaaagtaaacaaagagggttccctgacagagaattagaggaaggttttattttagatagagctatcaggaaagaaatggcatttcagctggaacttgaatgataaagggaatgtagttactaaggacttaagtcctgcaggtaccagttccatcatcttcaagatattgccatgatcttcacaaaatctttactgactcatcattggactctcaaccaattttagccctgtgctatctgcatcttttatatcacagaaagtgttgaagttcatactatatactaaatgtgtttgtctccaatcagactataagattgtggaatgttagacccatgtgtgatgtatgcctttgtatcctatcagattatatgattttggaaggttagagctatgtctgtatccagcataatatttatctctgtatctgcatgatacttaggataatagtatgtggccacatccaacaaatacttgttgaatgaataaacagtattccactctctgcaaatttggtctttctgacatttgtctgaattatagaaggagaaggaggctttacataatagttgaaaattactgttcatgtaatacagagttctgaacttcaaccagaagcaagtctacagcagatgaaaacatttgtaatgagggaattagctgtggataactttcggataggatgttataagtttagcatttgtattaaaatccattattatatgcataattaagttttaggaagaaaatctggctgaatagtaaacaattactattttcaaacagttcttcagcagttagttaccactggcttctagaatttaactgttgttttttttaatatatcaaactagcatgtgggttgagacacaacatcacattacaaatgggtagtcccttcacttgtagatcaatcagtaataatatagatactgatttttacagtttgtaaaattattgtcatttctttctcttattatctgtattctcagaaacaaagagtataaacaaagagaaagggcatgatgtatttttgataggctaccatctcaaattttcatttcaatgtttatttggagaaacacttttatctaaaatggaccttttccattttacaattgcacttgctctcagaatgagaactgcaccttccaggagagatttcaatctgactccaaagccttgaccctcacaaacagtgttgtttgtaatggcccctggttagaaactctcagcctaacaagcatgcagcatagcccctgaagtctctcctcctatctgcataaattggggatgtagaactcctgcatatccagcctcacttactcataaaatgctgggaatcattccaaattgctcttccagaggagggtttgtttttaaaattatttcagatagagatgtttcaaattctacataaatgcataatattatttctgattgtgctttcttggtatttctcttcctgtaacacctacttagccattctccagggaccacttcaaggacttttgtaatccatatagctttcctaagctgttctaactttcagcaatcccaaccacatcactgaccgagtttgtaatgactcaccagacaatgtgttgggtcctctagtaatactttgttaattccaagttatccttgctgctgttgtttctccgtgtgtgtttctatctgcgctctccagttaagctgtaatcaacttaaccactgggctttgtcttatactctacttctcacaacccttgcctcttaaattggttaatgtatgtttgatgactaattgtacacataatagctacttgataaatgttcttaagaaagggacaaattaagtattttccctgataatcctctataccaggcatcgctgtggaaagctgcacagttgggaaagcgtcatttcaaaaacaggaaaaatcacctgtaaattatttcagggatttgactttgacattatgttgacataaaagaggcttaagaacagctattagaaaatagaaacagataaatgaatgagtgaatggcatacctaaatggcatgaaatgtgaaaatgatacaaaatgttaaggtaatccttttttcttctctaattaatctccactgggtatggggaatagggaacaactggggtattcgtaacaggcaaacattcctgattcttgccctactaaaggtagggacattaggagaaaggatcatctacttggaaaataaactggcattgctaagtctaaatgattgagtcaagtgcaaattttataggccaaatagaattttcacaagtccattgactgttgaaaactacttgtaccctggctcaaaggacattttcttgctgtctgtagtaagcggtctgtaaactgtgtttaggacctgaaccgaatgctggcctttcacttctcaaactatagcttagtaatcccagctcagaagtccctccatacacaatttagtaaaattaacatcagagcataaccatgctttgttccctccagaagtaaaatgtgaagtttcttcccattggaagtctatttattattagtttcagatgttgtgacaccgttttcatccaaatgttagagaacagaaagaagccttttttaaaagcgtaactttcattattcatctaggtttttttcagggtccttgagaaatgctaagattatgccttgtgtttgagaagtagaaaaggaaaaagggaggaaaaccacctagagaagtgcttctcaaactttaaggcacacatgaatcacctggggaccttgcagattctgattctgaaggtcagaggtggggcctgacatcctgcatttctaacgagcttccaggggatgctgatgctgctggcccacagaccatactacctagagcagcaagctttataggccatagaggacattttttttttttttttttttttttttttttttgcatggagcacagattactgctctactctaggttacaattccaaggaaataatgactaaagaaaaatactgctgtttcaacatttctgagtcatttagtaagaatggaaggttaacattagcaatttaacatttcaaatgtggtgggagtatttattgatgtactaatttgcattttgttcctgccaaatctttttactctgttggctccagggagtttgaaagtctaggacagaatttttcttcctaggtttgtttacatattgtggaaaagaagtgagcatctttggagttaaggagagttaagacccaaggagaagaaagaaaaagactatgaaagatttttaaaatgtttatccctgtgtaagatctccaaagcccctcccttgacccagtagtagcaaatggagccacagtgatggctgaaattgaatatcccactaacttggtaaaagttgggcaggctcccagtcagacttaaatcattttagagaagtacaataatgtggcattccttgcaccctggtgatatgcagaaaatacatacctgcttccgacgaaatttaaacatggactgttaacaagaatgtacccttaaagttttgtaaactctacagcaaagaaaaaaaaaactgctacagaaaaaataaggattttttttctagctttaccagcgacctatactttcatttcttcatgttactaattacagaaactttcagcagaaatgtatcactcttgggcatcagttagttctaaacattttagctcttaggagcctctgatgacatctgttctgttgttagttttgctccctgactagattgtaacttctaagctcaggaatcatgtctgcaactacttttctttagtcctaacctaaccaagagctaggcatttaggaaatgctcactataaatgtattgacaaatgattatgtataattagctcttcatcacaatatttttcatcatcaagaaatagatttaaaggagatattttcaaacagtatggatgtatcatccccttacctttatgtatgtgtctggttgtgaatagtcagcacatattatggttaaactcaagaaacaagggaggttattttctaagcctgcatcatagcagtagaaatttggaaaaaaacaaaaaacaaaaaaaaaaaaacatagaattaattgagttgtaatcaaagaaaattatgtgactataaattgtaatatttctaaaatatacccacatatgccaatctattgtaagaaaatgttcgcagagggaaaacaatggaaattcctagaagctttagatagattctaatgattggaaataagtattacaaatggtccacattttaatgtgacttctagaattttttagaagtcatagtatcctttcacgctcttatgctgcttgcttacaacatacacttgggtcacgtttttctgttaggaaatatcatactaatgatttgtgatcatatttaccacttggggatcttggtggccatgataaggaatttggactttattctgattacatgggaagccactagagaattttagccagtgaggtagcatgatcttacttatgccttaaaaaggttaattgttttggtagttaattgaaggaaggcaaaagtggaagtaggaagtctagttaggaaactatttgattgttcgggaaaaaggtgctggatgcatgggctataataatagcaaaggagatggagagaagtgaatggattgagatggaactgaaagaacttgttgatggttaaatgagttggaaggagttagagaaagcaaagtgacaaagatgactcagaagtgtttggcttaagtacctgagtggatggtgaaacaattttcagacatagagaagaatttaggaagaacagtttttttcagacattgctcgagagttctgtgttaggattgagatacctattagataccaactgaagatactgaagaggctgagtagagtctgaagttcaatggagaggctcagactaagatagaaatttggaaccatcaatgtgtagatgatatttaaagccatgagactcgatgagattccctttgcaggggaaaaaaaaaaaaaagctagaatattggagggaagagttttgtaacaggacaatatttatgggtcgggcagaggaaaagaagccagtaaaggagaccaagaaagaacagtcggtgagctagaagggacaccaagtggctcaggcatcctcaaagctaagcaaagagcatatttttaaaagacagtaatgtactgggtcaaatgcctctgagaagttaagtaatataagaaataagaagggactattgaatttgatatgaacaggtttagtggaatggaaggattagaagtaaaaccaaagtagattcagaagaggagaaattaggaagtagagacagccattcagacaaggacttaaaagatccaggaatggaaaggaaattcctgggagcgcaacccctaagaagccaaaaatagagtatgctttccatgtaggtttttaattcttttttggtggtgttctttagaaagagaaatgtctgttgggattattgtttgaaatggtgttgggggcccaaccatttctggcttctatagatcccctttttgtacatgctcattcccttaaaaaaaaaaaagaagaagaagactagattttctaatttagggcaaggggctaatagcaaaccaaactcatttgtaatctaaatggtcacatattattttggttgctcttcagtggcactagctgctgctaggaagttcattttacacacacacacacacacacacacacacacacacacacacagcatttgctgcagatcctaaacttgaagccctggatcttccttacatcatttacccagaagtatctttgtcaaccttcttaacttacatccaccagaaagtagaacaaggcagaagttgtgtgggagttctgttcctccccatttcccccctcacctgctggcgtcagcacaataaatactgtgttcagaacttggctaactgcttcttttcccacattcgatcagggaatacttaaagccatacagtgtccttgttctgccaaaaagcatatggggcaggttgccccttcaggctgacacaaagacacactgtgcaagacatctatggccagtggagtggccgtgtatgggttatcaatgagacttttgacttttttctttatgtcatattgtcatcacattaaatagaattcaaacaaggaaacaaaatttatattctagacttttaaggcattgcctgccctatagctatgaaacttttctttttcatacctggtataattttccactttaaacaatgttgtgtgatttgattaccgttttgactctcatttaattgtccattttaaaaattttaactgaagttagatttagatttaaagttcaatacccataaaggatacttctcaatagagccgagaacttcagaaggcacaacaaaaaaagggcaaagttcaaaaaactaagcatcaggtagctactttttactgcccagggacatgtctaggtaaactgtcaccatatccatctacatttgcttgctagtagagcttccattttctactgcaaaatagtttctggaaccacttccatgttggccaaaagagagtgtcaacaattcctttccaaaattgacctttagaaagtgaatctaaaatgtttgattcaagtatgtgaggggagctgcatcaaagttttcatttttactacatacaaaagtgacagataaatccgtaaaatgtatgcatttttctgctaagactgctaattaatttaaaaagagattgttagaataaaaggtcagagagtaaacatattacagatatttattgagagcctgctgtgtgcagagttggaaaaaataaaatgaggttgctcctttcaacagacttacaatctaattgagggagcgacagcataaatgtatgcaaagcaaataatgcaagatacagcataagacataattaactatcagatgagtgacatatataataaataccattaattcacaggcaatcgtaatcagaagcacttaacttactatgtgccaggcattctgctcagtacttcacatacattatttcatttttttgaaatattatttctactttatagatgggaattggctctgatcttccccctattctggagaaagcaaggataatggtgtaaggtagacaaagacccaagcagacatgttggtctggggcaaaggtccatttaagggaatggagagaaatgaaccctggggccagcattagtctgtttacaaccatatcccagtgcctagtatagtgccttgcacataataagtgctcaataatatgtcttgaaaaaacaaatggccctctggtctgtgcctgtaatccagatcaagtaccatggaataaagttaattagtgaattaaagccacataccacatagcttaaggacccatccccaagacctcccaattcccaactatgacaataaaggattgcagtggaaaagatacatcataaggggaatagcaatagcaattccagctcactggggtctatttcatggaatctgacatggtgaacagttcataagtttatttccaggctgcaagaccctgcaacatctggcctcttgcacctccacaacctcaaatccttctattcttctctcactctctctactcctgccacacatacctcccttctactcctcaaacccatttcagggcctatattcttgcttcatattgcctggaatgttcttccacaaaacatctgtgtggctcattaccataccttcagatctataacagccactctccccacatcttcccagctgcctgacattataatacacatctatttccttatgtgttcatccccgtacacactagaacatgggcccaggaaggcagaattccatctgctgtttttgccattgaatgcccagcaactaggacagtgcctggcacattgtaagtactcacacacagcaactctaactcaggattactttttctagctctgaaatacctacttccaagagaacgaaatttattcaagaaatgttggatggaaattgaagagtgagcttggaaacgagacacagagtggcaggagcccagaccaacctgtttatgaaagatgcctttgcccatagagggaaaaatacaccttaaaacctctgccaaagtatatgctttcttaggacacctctgacatgctgaattgcacctggtctgaacaagatctatgaatttgccaaaacaactaattcctgtgatttaagagtcactactaccagtatcagcctagtaaacaagtaccaagcaacgagcaccacatatgtcagtatccaaagacaaacatgctgctgcatgcaaaaccagacaaatgcattcacgcgggtgacagtgagtggaagaaattaatcttatttttattattttttcccttatcaaacactagcaagggactagatgtcataaatctagttaaaatatgttgactttgcctcaaatttgagcattcatggttccaaaaggacacttgttataggatctgatgatgtactttagaatcttcttttgtgcaaattgagacttcagagaactcaaaatatatggtaaattcaaagtaatattataagtaaaatcataatgcctcacaacattttttgaaagttaaatatttagtaattttacaaatatgtattgagcactccctatatttaaggaactatgctaatgctgtgatggatcaaaaggagaataagccatgatccttaccttcagacttcaagcttattattcattgggcagttagataactaacatatcagacatggaataataagtgccattgtccagatattaaaaacaaaattggtgttgtggaagcaaaaagaatgtagagatggatcccaactaggagaaagaaaaattgcttcctaaagaagacacagattgaccatgaaaggtggatggttctacacaggactagaaggtaggaattcttcatttgttggacttgctaattttttttggtgtaaatatacccactgttgttgatttaaagttgataacgtgatgcaactgaacacagaactgggaagagaaggtggctccagcacgctacctatgagtcaccagctgagctccagacttaattaaatcaacctcctcactactattttgaatgagtgaattcacaagtcttaaaaagatctatgataacattataagggaagagatagtcacttctgtcattctcccttacatctccatctcaccttccaatattctgtttgaatatccttccaatttcagtcatatgttcctggctggcctacctaggattaatattggcccagtgccaaaatgtgattctatttattccttttagcattgctgtgattaatctgcgctcctgttatcccatggcatagcaaactctcttactgattatggcctggtattgacacctctgctgttctccataacgaaaagcagcttttggggtggctagctgggcaggatgttttgctgctcttgtaacagtaggaaggaaaagctggaggaattactgggaagctttgcagaaggaagatacaggccagctgagagccagcattcatattgcctgttcctttcagtattctttgtgaaaacaccaccaccaatgtgttccctggacgtcactactgcacctttaactggccttattatgctagggactgcatttgaaaagccaaactctagtatctgtctgtaattgcaagcggatatctcagcacatgcacaagcttatgtcaggaggatgtttatgaaaaactcaccaagcagaacactgctagacaggaaataaatatgtgaagcttgaagttgttaggaaacttccacatttgtccctctaagccagagataggacctgtgagaaaagaaggtctttatcattgcgcattgattcttgctgaacccctgctattctcaaaatacatttacagcaaaatgtggctactgcagatgtatttaaacatgtgcttttttaaatgacactggtttatcttccaagtttgttatctactattttactgtaaagcattaaaaagtgtttgaaaccaccagcaccatttcacagttcctgttttatttgtttaaattctctagctcatgtaatatgctgtatgatttactgttcaagtagagaagaaatacactccctcatggagatgtggggaggtaatactgtctcttggaagggctcagagatttcctgtttagattacacaggcttctttagagctgccaagagtcataacatgtacgagataatacactttggttcaggaaaaactatggataggaatgtaattaattcactgagccacaaaagatattccagcttagaaatgtcactgcactcaggcctggtggactcagtatgccaaggggtagccatgaccaaaaagaggattgctgcctgaggacccactgagtagtatccaaccacagagcaaaaggagggggcctggctgctaaggacatcacacgtctcacctgcttctttgagaattgatccctgaagggtatttctgcccaaagcctcagcaacctggcttcatcaatataactttgtgatgcttgtgacattgagatcaatcaatcagcatgtactttatcaagtgcctcctcatgagtaccaattgtggcacatagtggggaaaccctagaggcagagccctgcagaggatatggtgattctgaccagagcaagaaggtatagtgaaaagtttcctaaatatattttgtgtcttgtcataagaatcacctggcagggaggggtatggaagggcaaggtaagcatacacattcccaggacctttccaaaatgtagagtgaccagggacttagagattcagactctatcaatctggggcagggccctagacttggtatatttaataactgctgtgtgaggccctttacatgcatgacctcctgtaattgtatagcttggttgctgtatatggtactatgtttacttgtgtttgcactgtctattcaggggtgtttctaaatgccattgctacacaactggtgaattatgattcttgccagaacattgattctcctactcttgcttccttaatgacacactagagaactgggattggctgcatttagtctcaggatgaatcattgccataagtagatttccatcccctactccaccaactcatttgccaaacacccttaaagaacagaacccactgcctacatgcagcctgcaccaggagggcctaaatggtctagctgggtttatgacaacatcccgtcttcacatcagcaaaaccctaagtgcacaaagtctaatgtaaacacaatgtcaagttctccataggaaaagacatgtccctgctgtcaaggtagtgactagcaataataataatgacaaaaacaataacaatgataagcatatataacacttacttatcactaattatattgtaaatgaaatgatttgcatgtactaactgatttaaatcttatatatatatagatacttttactctctcaattttaaacacagagaaaccaagacctagatacgtgtttctgttgagaagttgagtacaaggttgagtgtaagtagggaaagttcaactgcagtcagttctagtcttggtaagtacactgtgaggcgctccaccccaagcatagcaaattaatggttccccagtgtttgcagaatcaaaattaagttctttggctaggttctccctgatgtgcccctgcttcttccctaattcaacacatccccagctccatccatgcattcccaacacatcacagctctttacatgcccaggctgtgtcttctgcacctttgtaccttctgcacctttgtttccttggccccaactgccctttcttttcctccacattaccctttatcccaaatttagcacctgtctcaaggagtcaccttcccaaggaagtttctccaaatttgttaacagatattccattgttcctccaatgcttgaccactcttcctttatagatccctgcctagaaaaatgtgggctcactgaggccaggggctgcagctagtttattttataacccagcatttaaaagtgcctatttattgatttgttgggaatagttaataaatggagtccttgcagatcataaccaagaccacagttcgtaatggtttcattaactttgttactattggatgtgattctctgcttatggtcttcctttacttgtttttcccttactgctcagcacctctagacattaggtacatggctctgatgctaattaaaattgatgactgagaatgacacttccatttgctaagccagcgcagttttgttcattgtgctttactttttaaccagcacccttagcataaatctgtagtctttccatgagggtaccatttgttccttttatgtctcgattcattacatattttcaggactgttagctgactaagactttttgctttgtgaaaatgtcaccaaatgcacgataaaggcaaagtcacaagatgtctgtttgcaaaaagaattaaatgctggtttgtgaagattcaaggctggccagggctccccaagcatttccaggccagagctttggctctgcactctccttaggatctcataactgacccccacattccatttctgccatcgtggaaaaatttgtcaactttactgctgatgttaggcctggaaattgtcatccattagttttctcagattcaagctgaaaattgagacaaacttcctacgtaattttgaccaaaataacacatatgtttatgtgctatcccatgattaacatatttttaaaaccactttattgaggtatggttggcatacaaaaatctgtgcatatttaatgtatacagcttcatgaatttggagataagtatacatccatgaaattattactgcatgtatgccataaacctatcacctacaaaaatttcctttcactttgttattattttgattaacttaatttttttcttcctttgaactatcaaaactttctcaagtaatacatagttgtcagttatacaaacttactgaaccttgaccaaaggtcctcttttagtgctcatcttagagaaagaattaatgaaacaaagtgttctctgatttgtagcaaagatctgtgatggtggtgggaatggttctagaaaataatggtaataataaaaacttagagtatcaaagcagcaagtagatttgaaggaattgttacaatgcaattttgctttcccgccactttaaaatcaaggtgtagtactttatttactttaggaaaatgtttgctttttgtcataattccttattgcatatgagagtaaatgatctatagatgaagataataataaaatttagagagagaataaaaaagaaacactttcacagctgaaaggctgcttcccagttagctaactgggaggagttactgaaaaagtacattgaaaagcggctcaggggcaggtgaattggactcaccaggctctgacattcagagagatgggaatgagtcagctcactgtccagcacatctttattttatttctctttcttgttttatatcagaaatagatttcttggcattgttactgtgggtttctattaaggactgaaacaaaagtattaataatctgagagtatgtaaaaaaaaaattcattttctcctactatactctcataacacagaatattttggtgaccagagatcaccaaaatgtgtgtggtgtcaacgaaaagagtcaaactctctaaaatatttgaagagattttttctgagccaaatgtgagtgaacatggcctgtgacatagccctcaggaggtcctgagaacatgtgcccaaggtggtcagggtacagcttggttttatatattttagggaggcataagacatcaatcaaatacatttaagaaatacgttgatttggttcagaaaggcaggacaactcaaatggggggcttccaggctataggtaaatttaaacattttctggttgacaattagttgagtttgtctgaagacctgggattaatggaaaggactattcaggttaagatatgtttcttattggacctaaaactgtgcctggctcttagttgattactgcctggatctgggaaggaaggaaggaaaacaaagggggaaggggattctctatagaatgtggatttttcccataagagactttgtagggcaatttcaaggcatggcaaggaaatatactttggggctaatattttttccttgtctcataatgttatgccagagtcatattgaaaagcaagtcacaatatacaaggtcaaataaaacccatcctgatgagaacccatggtttgtagggcatgactccccagaacccttaggtaggaatttgggcaagataaaaaatcggaacttagtcctcggtgggaatctctccccacacaaattctccaacagattcttcagtgggacaccaactgggtgttctcaaattcaattcaattctgacaatctacctatctacctggaaatagcatcagataaccacaggtttacggctcattccaacaatactgtcccccacttcagatgccaactgcaagtaataggttgttacctatacttctagccagtcagctgtaaattggtgttcccacaacctccccctccggtttgataatttgagacagcttgcttacatgtaccagcttattagaaaggatattacaaaggacacagatgaagagatggatagggtaaggtatgtgggttggagttgcagagtttccatgacctctctgagtgcagcatcttcatgtgttcagctatccagaatctctcggattaagacattggccactggtgatcaaattaaccttgagtccctctccccttcctgaggttggagagtggggctgaagtgtctcaacctctaatcaactcttggtctttcctgtgaccatgccccatcctgaggctctccaggagcccccaggcatcagtcaactcattagcatacgaaagacacttatcactacagagattcgaaggattttaggaactgtgtcaagaaacggagacaaggtcaaatatgtatttcacaatatcaccagtagtttcactgggaggtaaaactcagtgtttactgtgggcctgagccatgctgaccctctaagaataacttagaggtaacgtgatcagatgtggggaattctggagaaacacctttcaccaccaagcccagacaagagatgcatacttttctagctgggatgcttacaaagcaacccactctaatacttcaaggtagagtgacactacattcatcatttttcattttttcctgttttttatgccatctactactaatgtcaatcaaattacgactgtgtttatagtggatgaattatggaccatctcacaccataaagttctgtttctctcatgttgagcttttcacctcccttcattccctccctacttccaggatcattcacatgtttatttctaaaaataaactttttttactgaactttttttcatactgtttaaaaagaatttatatttctcttcattcttacagataagattcaagtttaaactcaaataatgtaggaaatctttttttaaaaaattgttccctactgtgtctaggcgtgagaccaaaagtaattaagaccaggttttcatttgctgtgatttgtgtgagttctttttagaggttaggtgcaattttaatttttaaaagggggattattatgagaggagaaatcatactttatcatttgaaaatgatgccataacaggtgttagcagaaaaatcaaactgtaaaatattttaaagagatttattctgagccaatataagtgactgtggccccattgaaatgagcgagttccctgatccctctcacagagcttgcgacagggatgtggctcacctgttcagttgccccactgctcaaacccctagggggagaatacagacggtcaggtgcaaaggctggggcaagtgccttggccccttggccccttagccccgaggtagtgtctaggggtggggtgcctgcaaccccagtgttacaaagttctttcagctttgcagtccacggacagcttgagtgttaatcagctcaatggaccctctgccttatagcaaaggcagagggccagtgtgacagctttctgtatcccaagctcttgcccagtgtcctagaaaaaacagatcatacaggggctcgaaggatgagtgcaaggttttattgagtagtggaggtggctctcagcaagatggatggggagtgggaagtggggatggagtgggaaggtgaacttcctctgaagtcgggcagcccagtggctggactcttctccaacctcccccaggcaagctcctctcagcgtccagatgttcctcttccctctctctctctgccgcatcatttcaccatctgtctgctggtcagctggcttgctggtgtgctggtctgttggtctgctggtctgcttctggaacctcaggttcagagtttatatgagtgcacgatagggggtgttttgggccaaaaggtagctttttggacatgaaaacggaaatgcctgttcccatttagggctgcaggtcttcaggcttgagggtggggcctttgcccaggaactaccctcttctacccagtgtttccctgtctcctgtccatatcaccagtattcacagtctcaaggagtcttgagaaagtgtgcccaaggccgtcagattcagtttggttctgtatgtttcagggaggcaggaattacaggcaaagacataaatcagtacatggaaggtatacattggttcactctgaaaaggcaggatgtcttgaagtggggacttgcaggtcatagtttggttcagagattctttaatctgcagttggttaaaggaacaaaactgtacagaagcttcgagttagcaaaaagaaatatttaaattaagataaggatgctatgtcagagtcagccacaaaatgacctgtttagcaagattaatggcctataggtgtgacttaacccttgccttgcatggcctaaggtcttgtttataatttagtatcttattgcccaaagagtctatttagtcagtcttatgatctctactttaacattaatgctggtcacttgtgcctaaactccaaaggggaggtatatccaacctgccttcccattgtggccaggaacctttctctggagtccccttggccaagaaggggtccattcggttggtttgggaagctgaggattttgtttttagtttacacagggtcatatcagattgttttgatggggatgactaatggttttcttctctttctgtttcagccacagcagctatccttagcagagcaccctggagtctgcaaagtgttaatccaggcctaaagacaagtaagaatttcagtcctttttcttccttcaatgatattttccatgttttagtgtaattaagctactatcctttctctattttatttgggatggtagtaactggaatagtgactgagttgaaattttataggcaagcaaaacattttttaaggatttattttttaacttctgatatagtttggatgtttgtcccttccaaatctcatgtaatccccaatgttggaagtggagactgggaggagatgtttgggtcatgtgggcagattcctcatgaatggtttagcaccctcctctttgtgctgtcctcaccatgagtgagttctcatgagatctggttgtttaaaagtgtgtggcacctcccccttcaatctcttgctcccactctcgccctgtgagacacctgctccgcttcaccatgattataggcttcctgaggctttcaccagaagcagatgctaatacagcctgcagaactgtgagccatttaaatcatttttctttataaattacccagcctcaggtacttttttatagcaatgaaaacaaactaatacaacttctgtgcaaggctgcttttttttctattttttgcttgtgcttggaggttaagtaaggccaaattaatgaaggaggaaaaaagaggaaatgatacatcatggatcaacaattatttattgaatttaggaaactgcctctttttataaattctttttaaaattattttcattattatcttgaagtatttatctaaggtttacactggtagaaagttaaacttgtctctccaaccaaattgccttaagcttcaaaattatgccttattgtaagctctttcttaaccttaaaatgactttacacattccccgctggtcctttgacaatctcctcttcaaccacaagacagaaccccaccatcaactctgtggggaagcgtctccaaattctctagtcctgaacaacattctgccttctctgcttccatggaactttgtcctttacaacatgatagcgtttgcctcctgacattttagtgtgtgtgttagccctgcatatagaactcaccagattgtgtggactgcatgaatgaattaattctattgaactttaaggcaaagcctaaactttatgcttcttctaaatcccttacatctcctaaaaaaattctgatccatagtagtaggtacttgtttaattaaattttagggatggatatttttcatcagtggaagtatatgctagagtccatattatgcaataagggaagggaagacagtgtacctaaatcagttaagatattgctattcttgttgttattctagagtcacgaaatcataatttgaattttatgactaaattgcagaattaatttccaatgtgagattttaacattatttccttggaggtgaccaaaaaggagagctggtactgtttttaacaactgtcattcaattgtcagttgtgccagaccacaaatcctttatagccctcctgtttaagaagcatctgacatgttaagctgctccctaattaacacagaggttgtaaaagaagtggctgtttggttctgtttgggtttcccagccagtatattccaaagccttttttcactcaacagatgagttatgtgctttatattctgtaaggaaatgagaagtaatcagttgaaaatgtgttactaatggtacatgcttcacattgaaaccatcctcctgacacaaacataatactttgccctccactgtcccccaaagtggcagtaggatttctctaagtaattttctttacttatatgagtgcaggatagggggtgttttgggccaaaaggtagctttttggacatgaaaacggaaatgcctgttcccatttagggctgcaggtcttcaggcttgagggtggggcctttgcccaggaactaccctcttctacccagtgtttccctgtctcctgtccatatcaccagtattcacagtctcaaggagtcttgagaaagtgtgcccaaggccgtcagattcagtttggttctgtatgtcacagggtctaagaagcgtaaacattgtgtcttgttgaaatacagcctctaggtatggaggatgtgttgaacaacttcctaccagtcatttggcatatgttgatttcctgtcttcatgatacgtaagacgactagctaattatcattcatatgtggtaagtcacatagatactgacttcccctatctttccagctttttcttatcaaaagtcacctgctctctgtcccaggaacgactggctaaagtaacctatatcagtgtctgtaacagtgggcacctatcatagtgcacatgcttgaacatatcattgccttttatcatcacgagcctcacatccagatgtgacagactcaagtgctcacatcacctcactctgtcactgtatacattgttaccgtgtcacaaatatttaacagtctgctgtgtactcagtctttagctgtgtgccctgagggagacagagtaagatactgccttgacatcaaggagctcacattctccctaaagagataatttcacatgaaaagttagtgtttaatatgaaaagttagtgtttaacatgaaatgtcctgagaatatacaattataatttacacgtttcctgtgtgtacttttctaagttctcagactcaaaacaaagccccatggaagaaaaaatgaaataaaaaccctgtcaggacaaatcctagccagaactgaccaaacataaaaaataaatgccactgccctctccaagctacctttactttatacttgggtccaagaagcccaaacattgtgcctcattgaaatataacctctaggtatggaggatgtgttgaacaacttcctaccagtcagtgcagtgcagtgaccatttagcagcatctccctcctctctccttccaccccctgccccatctctccttccttgcatctatcttcccctgccaacaataattttcttatgttctaagtaaatatctttagtgctctccctactacctaaacattaaacttcaaacctttcccaagaccctgaacacccaccccagcttgtaagttcaggctacttaccattccccaggcacactgtattttccctcctctggtacactgctcatgtcatcgaatctatcttcctcccaccccatcctggattctgtaaatataaatcagtcctgcccacctttaagtttcagtcaaaacctgatactcatggcctgaagcaatccctcccttctccatgctggtctgagagaggtcatgatatttcagtagctctggagagacacatatggtcaaaccagaccagctaaaattaacccatgctatgcacaacctaaagaatcacctcttgctgtaacctctttcttctcttgctcaccaaaaactgtctgtcacatttgctaagtaagcccttagggctttgctgtgctggcaaaaggtcttaatccatgtgaatgtgcatttttgtgttagtgagcacatgctaacatgccttccacagattagtttcttaagaaacattttctgggggaaaaaagacctgtttttggttagtaaccccaaaaggacctttcagttcacatacgtggtagcagcatactccacttatgcaaaggtcagcccagggtaaatatgggcaaaaacacagacttaggataagaagaatgttaagggagtttacagtttaaagagatatccaaacaacttttttatattttaaagaagtaatgctataattttactacaaagaaaacttctttatatttctggggagaagaataggaagagttacaatctcctagagaaaagcaaaacatttttagtattcccaaataagacaggcacctcaactagggtgctgtggttgcacgttctttgtagtttttcaagaattttatttctctgtcatgattatttattggcagaagatttgttgggccaaacatgtaagactttcttaaacacatatagagaaaaaaattagatgattgcacatctttctgagggagatttttcccctatttttaaaagtcattgcttttcactgaatttgtcttgtattcctataaaagtgtaaattttgtgattgatagcatttttacctcaaaatgaaatgaatatccaactggagcaagttttattgactgcttattggagcataaattagtctaagttttcatgaaaataggcatttgaacatgagtattaatggctgagatcagaggcaagttttgaaaggattccaaaatattatcatattagataggcaagcaaatgaattgcttgaatgctagaagttcacaaacattcaaacaattgtgagttacattaacttcaataaaaacttttgcaggacaaaaatttaatatagtaaacttcatcttgcttgtccaggtccgtatacattcttagctggactcttgtcctagcttcctaatttttcttcctatctcctatttttccctattccaagccaccatactctgttcttgattaattcttcctgcctacctctgattcagtgattcatctgcccaatcatctatagtagctccaaactcttttctaaattatgaataaacttatctccctggcattcagaaaattcaacagcattcatcttacacacttttctagccttatctcccttttctcttatgtactcctatgtttatattccctgcagtcttgcttcattatatccatttacaatgacccttttaccagtaatttcctcttctttcctctcagtctgaaacaatccttcatagattttgtcctgtgagccatatttcaaatacaactttatccacaaagctttgcccagttcccacaagaggattctgcttttgctttagaattgtagcctttttttcctctctcgcaaggagagagagcgtagcaccgcagtttaagtactcagcctctggagtaagctttagtttaagacccagttctactgcttacttcctgtatgatcttctctaaattttatgatctctttgtcttttttttttcatctctaaaataaagatgctaatagtacctacctcataagatggttgtgagaattataagtgttgatatatttaaagtagttagaatagtatctggccctacagtaagcttacgtggtatttattgtattctcttatggctcttattttattccaatgtgtattaaattgaaccgtatgaaattgcccatgtcaactctatattggaccctaaaatcattatgtcttttggttcaaccaaatgtagtgctttttgcacccccccttaataaattgaactatctctaaagatagggacaatatcttacacatcattatatcctacagtacctgctacatacttgacatatgctgagtatttcacggatggttattgaattttgcacacacacacacacacacacactgcaaaaaataaacagaagccaagccctccccagtatcttaagtactctttggctaccagggagtttactccatgctgttcagcagtcatttatgaaaggagagtgataaagatatagaggaggagaattttatcttgtctattgctgagtataaatactatgcctttccgaaaagccttccacagaacctttccttcaggtcagggacctagtgtcatgggtcggtcttggataacgttgcaggacatatcagttcaactgccaagggaatcataaatagtcctactcctgcctgcggcccaccactgcctctctgctttcattcttttttatcagatattttcaacatcaagaacttattagctgataatttaactaaattaagtataacataagggaaatgtgtcctggcagagatggcatcttagagtgaatgcacagtctttattggttaccaaaaacaaaaaaaaaaaaacttgagctttggacaagcagtagagagcagatttgatactgggttctgacatggaagctgacattaaattattgacagtctacttgtttataaactattcaataaacaatttagtaagtaaacatagattcttgcaatcccttttaaggaaacagtgtttatgttggctctctcttgtacccaacctagtgctcagcctttcctgactcacataagcactaatctccagataacaccaagcaccctagggttattatttatcccccttccttgttctctgaaataagagaaaggcaggttaaattatgcactttatgtaagaagaaatggaggtacagagaaaacagcttaagtctcttaacagcccaagagagtgaagaagatattgccaatgcaatgagttgtatctgtccctaggtaagtaaaatattaattaaagcatacaactatattaataattaaaacaacagtctttacttatatggactttgcagtgacttttttccagcctgaaatactcagataatgactgccattagtttcacacgttagtgctttattatatactgctttgttttcacacaaaatcgttgagaggtaagaattttttgaaagaaatatttggtcttaacttttttatcccccttcaacttcaagcaattttctgagcaatgataagtggtaagtagatatttaccacttagtttacaagagacctgtttctctctgtgcattgacttaggcactattaatgaaacctttggaatgcaggtcccttctggttgtaaacatatactgaggtcttctatttcttttggaactcaaacaataagaaaatagttagaaatctgtttgtgggcataggtctctaaaagccttaatcttagaagtgagtaaaaaaaattttaggccagacgcggtggctcatgcctgtaatcccagcactttgggaggccgaggtgggcggatcacgaggtcaggagatggagaccatcatggctaacacagtgaaatcccgtctctactaaaaatacaaaaaattagccgggcgtggtggcgggcgcctgtagtcccagctacttgggaggctgaggcaggagaatggcgtgaacccgggaggcggagcttgcagtgagccgagatctcaccactggactccagcctgggcgacagagcgagaccccgtttcaaaaaaaaaaaaaaaaaaaaaaaattagagcctaagaaggatgattaagcatcttacttaaattttcagtatgcctatgtacactctatatactgacttctagcatggtttctttgccaaagcataacacacattttttaaagggataattcaagacaaacattctttcaccctgggtgaccccaatgggtggtgaacactttttagtaactcttgaaagttaaagcatccaacagttggttgtgacctttttggttgtgacctttgagttcttctagcttgtagcccactgatttgctgcttaattccacagcttcaaaaccaactctaatcactgctcccgagagagccctagcttctgcacacatgagtctctcaccaggaaaggatacctgaagtccagaaaagccctttgttcacactggctcctcctagtggggaacagtttttttaaataatgtacatttatgcactgggaaaatatcttgaatttattatttaggtgtaaccagactttaatacaacttaacctacacactgagaaagcagacatttacaaaaagatttatggctttgacaaagcgttcaaatgtagttaccattaaatagtagttcaagtaattgtgtgtctcatggcaaatacatgcaatataaggtaatatatatttaagccaaaaataacaagaggtgatcatttgctaaacaaagaacttattacttaggaaaaaatgttacacaactttcaaaggacttttgaaaatatagtatgatttataggaaatttatttgcatataattcacaatatctggtacaaggtaagctacctctgtgttttttttctttaggtcaacaaatatttaaaccaagggttggcaaacaggccctcagaccagatgcttgtttttgtaaataaagttttattggaccacacccatgcctgtttgtttcagattgtgtttactttagggctacagtggcagagtggagtagctaagacacagagcataggtccacaaacctaaaatatttactctctggccctctaaaaaaaagtatgccaaaccattctaaacagcaaagcaattaattcttttttttcaactcttattttagatttagggggtacacgtgcaggtttgttacatgggtcaattgcatgtctctgaggtttggtgtacaaataatccccttacccaggtattgagcatattacttgatgtttttcaactcacaccccgctcccaatcttcaccactctagtagtcccctgtgtctactgttgccatctttatacccatgtttatccagtgtttagctcctgcttataagtaagaacatatggtatttcgttttctgttcctgcgttaattcacttatgatgatgacttccacatacatccatgttgctgcaaaggacatgattttgttcttttttatggctgcatagcttttcatggtatacgtgtaccacattttctttatccagtccaccatcaatgcgcatctaggttgattttatgtttttgctgttatgaatagtcctgtgatgaatatatgagtgcgtgtgtcctttttgtagaatgatttatttttctttgggtatctacccagttatgggattgctaggttgaatggtagttctgttttaatttccttgagaaatctccacactgttttccacagtggctgaactaatttacattcccaccagcagctataatatggttgtttgtttgtttgtttgtttgagacggagtctcgctttgtcgcctgggctggagtgcagtggtgcgatttcggctcactgcactctccgcctcccaggttcaagcaatttgcctgcctcagcctcctgagtagctgggattacagtcgtgcaccaccacgcccggcaaattttttttatttttagtagagacgggatttcaccgtgttggtcaggctggtctcgaactcctgacctcgtgatctgcccccctcagcatcccaaatactatactgccccctcagtataatatagtattttaaggaactaatcatcaagtttgtactggttaccctcttttagtctcctgttatcttcaatttcataattggcattaatgacaatacagtgttcactttataaatttgcttcatagtaaactcttctgaaataaattacagtcatgcatcacttaacagtggggataggttctaagaaatgcataattaggtaatttcatcattgtgtaaacatgaagtgtactcacacaaacctggatggtacagtctgctgcacaccagcctttatgatatagtctattgttcctaggctacaaatctatacagcatgttactgtactgaatattctcagcaattgtaacacaatggtaagtatttatgtatctaaacatagaaaatgtacagtaaacatatagtattgtaatcgtatgggacgactatcatatatgcagtctgtcgttgaccaaaacatcattatacagcacaagactatagttgaaaattttaaattacatatgtgggttgcactgtatttctgtttgcagcattgatatatacatttaatggtttgtatgtttgtgcttgcattcataaatattaaactgttacagggagcatattttcttgtgtaaaaaaataaataatttttatttctaatgacatataaaattattatggttatgtttaaagaggcttgaagaggtattatggttatgtttgaagaggcaacggaaacgtcacctttgtcattgaccaaaacatcattgtgtggctcacgactgtaatagtgtaaagtaaggattcaatgtatcggctaatcaatgtggacatatcattcagtattattaaagatactccatccaatgaagactgaacacctgtaaatgcttggtgatggatggaaagggcaattatttgcagctggactgtctgagacgtgtcatcattattgcataatatttatttaatgaaggatcaatgcaccatacagctccagtttgagaacacacttgacattgtagtttgtagatcttttataaactaactgctatcactgaatttttgctgaagaataaagacaaaagattctctctttaggaaattgtgcactttaaagactcataaacctgaaacctcacagaatcataatagatgtattttcagagacaatttctgagtccttgacatattctcaaatgtcattcatgtcttcactgccgcaggttatctttttatttttatctgtcatggaaaagcagccttttttctttttttatctcctactatgccttaataaatagaatttaaaaccccgaatttgaattattgtgaaagccaatatttgtagcaaatccatctatgctctgtgttgtcagcacatatggttttgtgtacctgctaccatgaaactctgccagggttatcctcagagaaatggagagacacctgatgccatccttactctgacagaagtttttctttctgtgaattccaaaaacttttgaagttatgcatctcttgcattgaacttcagtggcttgtgtacacatggtatcttcctttctagattgtaagttctttgagggcagggactgaacctttctcatctttatatgctctgctcctccacccttggtttagccagggccttacaaaaagtagaagcttaaataatgtttattaggtgaatatcatactaagttccagaaattacctgagagcaattgaagaagggaagtgtggagggagaggtgttagcatagatttcatagtgtttgagtttggcagtttggcatccttttcctcaacactaatactgacacagataagtaacctaactgccttctcaaatctgagagcagtagatgcattttctcttttgggacttttctatctcatgtgggaaaagcaaacaagaaggtcctgcaaaagtcttgtgggtatttattcttatcagtggttgtggcaaactctcttactggtttcaattggtcccacaggctatgtgatgaggactttggggtttggggagctgggaaccatgagttgtctcttaagtatgacctaacatactgctaataccccacaagcttcaatttatccatctcgaaatggagatactaacatctatctcaaagggtcattgtgaggagcgagtaggaacatagaaaagttcctagcacaaagtagatatggaagatatggaataaggtgttaggtattttattatttttactgctgctgctgctgttactactactgctattattattactactcctggaagagtaggacttgcctgggacactgaccctacttaccccttcacctcattcaccaaaacttatctcctatataaattcatgtatatttttctggaaggataagaaaaatccttcatctaggtagcgtattttgtatttgaatagtttatgtttcaaatcccagagaaggcctatacagccaaatttggaaaaaaaataaatttaaaaataaatattcagtgtttcatatataataaaatacctaacatcttattccatatcatatatgtgtgtgtgtgtgtgtatcttttaattgccatgtatttctaccaaaaaatacaaaacttaattttgcgtcctgaaagaccctcgtttgagaatccctgcttttatgttctgctttagtccaggcaacagatagcttaggttgtcactttacaactggagcagcaggtagggctgagaggctcgccatactccaaattaccagtgccagtcccatggcaccaagacaggaaaggcaggcactcaaacagaaaggtagtgcaattaattgcttcaaattctttactcagggctgcccttagtcatgatcaaataaaatgtacacattgtttggcacttggtaaaatgttgtttcctttccttcctccttcccctgatagactctccttaggtacaaaaaagatgaggctgtacacagagctaaaagtgtacacctttgaaaaaggtgtctttttcaaagagcaccttcaccccttactggactaaactcaatccaaagctcttttctctaagctttataacacttactgcctggatgagtcatttgtcaataaatacagaatgtttgtataggtggggttcttgtatatatgtacgagcccctagagtctctaacttaaaatttatttttgctttagaagttcaggaataaggaggctttgatgatcaattttaacaaccgcaatatataatacagtaactaatggttaggtgtccaggctagcccagggcagcctgtgtgattcatgctgctggtgaaccatggctggctgggcgaactagatctggaattctgtggtgcctaagggagggaagggaatatttcccacactatctcatcctgccctcactatcgctacccccaatctctctctacattctaccccacctactttgctttttctgtgaaagaccagctggggcaaatattttggattaagtaaaatttgtcttgggtaacttccctaaaatttagtttttaattgaataatcttggttaatccatgagtaaataagcttgtagagtatagtcagcctcactgtgagaagctgacaaaccagaaaaccagaggaatatacaccaattccttcctgtcctgcaaacctctgcttcttgaggtttttaaagagtgggtgcctaattgattagtcattagttattgacaggaccaaagagatatgcctggctcctcttggaaaaaccaaaagactgagagggaaaagtacaccaaaaagatacctaaggaggcagactgctataaagaaaataattaggagaagaaatcatatgttttcagatgaaaagaatctgaggatgaaaaaagcagccttttcaggccgatgatggaaagatagaaactaaattcagaaggatcagaagacgattagaagggcaagaagtcatagaagaccaagatttcccaaattaccaaaagaaatcaagcccagtcttgttcaggctgcagaatgagaacgcccttctagtaagatccgtacaatgaatttcacaaatgttgatttctttctgtcctctttgagcccataatcacctccttctacttgcacaaccttgaccatcaccactacctataactaataaccagttcttatgttcccctcaaggcataacacaaaaatattttctttatgattactttctctacaaaaaagagggagagagagagaaacaagtcaggggacttcgttggtgagtgtagaccacagcaagaacctaaaatcctagtgggttgttagtatagacaggctgaaaccactatcctgaagtggtggttctaggtaggtatgcccatcagaatcatctgtggataagtattttcagtaaatacacatgcaggacctctacctcaaatgtactgaattgaacttcattgctggagcttaggcatttcatatttgtttcctaagctgctataacaaattaccacaaacttggtggcttaataagagaaatgtattctgtcacagttctggaggccagaagtccaaagtcaaggtatgaccaggattggttccttctggaggctctgaggaaattctgttccatgcctctctcctagattttggtgactgccagcaatctttggtgttctttgatttgcagaaacatcattccaatctctggttctgtcttcacttgaccttccctatgtctgcgattggtctcctttctgtctcttttaaggacacctatcactgaatgtagagcctatcctaatgcacaaggagctcaattataccttaattatatctgtaaagaccctttttccaactaaagtcatattcacaggtaccaaggtttaggacttgggcatatctttggaggatacagttcaacccattacacatatgcattgaagggaaaaattcacgccacaactgattatcctataaagaatgttggcttaacttaacgcatttaacgcaccatttctccagcacttaggaaatgctaggagatgcaaagctgaagctaaataggcttctttattgcagaacctctcagaggctctcatctgtttgtgtgcattataaatgtccaagagaaagaaaagaatcacaacatttcctggaaatacttgaccagggaacttcttttcaagggattacctgttaactacctcaatggacactaatgactaaaggaatacatgctgctggtgatcatggcacttccaaactatgctcaatggtgtgggcatgagtctaccacagtgtctaaacactaagattgttaatgtctacacgacctctccctggatatgagcacacatccttcatcaaatatccacagtggtttccctagaggatttgcatatgtgcatggatttttagatgtctagtctctactcttgtcttcagccatttttgtagagagaaattggcaaaatattagcatgaatggaagggaaaggtggccaagataatacattatgcctttttttttttccctgaaaacagcccagaatatctgaaaagggagaagtgacttaatcatttctattcccacaattctggtcctacaaaattgatatcagtatatgattcatccagagaagttcacagtggtatttttttaaaaaaaacttttagaggttaccagggcatctcactattttaaaatttaatacctcaagggaaataagcaactaccttgaatttttgcatgaattgcatttgagaataactgaatagttggtggaataaagttgtttttttaaaagtaggcatattctagttaataaatataaaagaaatggtaggattagaaaaatcactacattacaaactctaatgacataatagatttaagcaagatgatcagtgaatgataaaatatttaggtatgctgtcttctaggtgaatcaagctgacaataccttggacccacgttaatcttaccacatgatattatatgtctcctgatacttaaaataaatatcaaataaatcttgataattgttgaaaattgttgatgaacatatagttcacagcaccacccatgatgtattctttccatgagaattgatctgaatcaaagtaagcctctaggtctaactgccagtgtgtaggaaataccagggatagagaaacatttttaaagtctttaagattgcagtaagctgaaagaaattgtctggtttctgcaataacagcaacaaagttatgtaataagaagagagagggagaatcacggatttatacaaacttaagagacactgtgtgaatctagtttgtatcctgatcaaacaaattaactgtcaaaagatgtcttttgaaacatgatgggaaatttgagcataaactaagtattctacgatattcaggaatcattaccaatttgttagatatgatgttggtatgtttttttaaatgagaaagtttttagcttttagagatacatacctagatagttatgggtgaaagcatatcattaaaaaaaagatagtggaagtacacaaaacaggattgctatatgttgataattgttgaaccttggtgatgaacatataggaattaattaaaccatattttctatttttatgtttattttgcaaattccaaaataaaaatagaataatccctcatgaacagatggtctcaaatttcatcctcaagtaaacacaattcacattctcaggggaacccatgagaatattatgaagtatatgtctatctcatttcattatatatggaatcctaccattccttttgtctttattactagtggccagagttctatcttgaaaggtgggaaatgtccttatatgaacagattagtttagagaattattgtgagaaaaccagaaaatatttgagttctagctaactggatattgaatgagttgtgctgaagtatgtggtcataaagggttgataatgaaatacttgctttccagtggcaaggaaaaataaatgtcttagaatttacaaggtcattcttgaaatcaatcaacgtgggctgaagatctcattgcttctgttatctggcacgatggtatttgtttgtgcacagctctgttgatgtgagctatcaaatatttcttagagctgaaatcatctaatagcaaacattgctatgtcccaatggagattccaagactctttggccatggaacatttacattctatcccctttcatcactcctgaacaaacaaaaacaaaaaaaggaaagataaccaataggctttttatttaattgaaaaccaaagagagagagaggaaagaaccagttagttgccattttctaaatgcaggcttttgtttgtttctgccttctaattctttgctcttgaagctatagctttcaagcttgtgtatacaggcccagagagaacatttgaaatgtggccaccctacccatgtccatgccactcttcctgcctttctctctgcctacttctgctccaccatcccaggtcaggggcttggaggctgacagcattacaagtaatatagtcgttcaagctcatataaacaagatgaaatccaaataataaccaaaatgtattttatttcaaggactggactactcagttccctcagtttcgctgaccgatttctaggagccctaggctcagctcttggttgtctcagaactgaggagagtactcatttgcaccatatgcatctgcttgttagcctgtgctaccaaaattgattcattacttggccttctctgaaaagaaaaatgaaaacaaaaatgcactcttaaaaataattattaaaatacaaccaggaggtatgtgcctagacatggctcaccttctaccaaatcatactttatgattttccacaatattatcttctattcctcctgcccctaaggttccatggagcagagcaagttgaagaatgttaaggttttactaaacttttagaacagaggctttggggaagcaagagagaggtacactgaaaatgaagtgtctgtctctgcttctattaatgtcataggactagaagttgacctcatagctgattacaaatgaaccctgcaaattgaaccccagcacatgcctctcattatccattcttctctttgcaggatggggtccatgctcacatatcaagaaaatggtgggtttcagtctggctcactgggtgaggttttggcatgaaaactaatacgggttagtgtacatcacccataataaaagtaaaagcttttttttttatttacccaggtaaataagcaaaaggcagatctaaaatacattagagttaagttccatggggacagaaatgtctgctttgtttgttgttatacaattgacacctagaatggtggctggaccatagtgactacaaataaaatatttcttaagggaatgaatggttctgcaggatagatgttctctgcatttggataagtgatgatactatagactcagagcctagatagaaaatattgtcccactttcagttctgcaaactgacttgaggtgcttggtgacgtcctgcagcaagcaaaccaaatgaaggcatctctgagaccccatagtcaccaccagcatgctagcctcccattaccttgcccaccctagattttcaaattgggaatcactgtggtaccagactgggaatcgtgacttgcatactttctcatattggggcttgggattttgagatcttatttccttttttggcttcttgagatctgaaattgttgttcagagaaggatattaagacaatgactcttccattaccatgcatttctgttaccaacagaggaggtaagtgaatcacttaaaatgatacaattccatccacttcagtacaccataaacatatccttagctttgactataattatagtatgtgggtgatgccgctgagaaaatggtataattataacattatggttgagaattgtctgagtagaaaacactgagctgtactgtgcaaagtttaaggcggaattgtgggtcccttttcaatatgaataaaattgattagccaattgcaactgagagctttgtgcaatgatattaataatataaaaatcggccgggcgttgtggctcacacctgtaatcccagcactttgggaggccgaggcgggtggatcacgagatcaggaaatcgagaccatcctggctaacacagtgaaaccccttctctaataaaaataaaaaaatatagctgggcgtggtggcaggtgcctgtagtcccagctactctggaggctgaggcaggaaaatggcatgaacccgggaggcagagcttgcagtgagctgagatcctgccactgcactccagcctgggcgacagagcaagactgcgtctccaaaaaaaaaaaaaaaagtcaagggccaaagtaacaatgtaggaaaaatttgatgactttaatttcatttacttctaggagtcttacatgcaagcctaatgcagagtagagaagctcaccaacttgaaggaagcatgaatgaaattacaaggaaatctagcttagaaaaattaaccctgtagcttggtttttccactctttgctcttggcaaaaggatcttacgtatgtataccaaatgtctatttgaaaattttgtttctctgaatatagctttcttttctctttaacacactggtccagtggttctagattttatgctcccataaattaagtaagacagcattctatatcatgactgaggtgttaatgacattatgcagttgtcacattttgaaatataaacttaaatgcgagcttttcactgtgtgtaaagtttctctgtatttttttaaaaaatttttaaagaccagagattttcagcaacaagaaacataaagaagtaaaaagagcgtagaaaccctgccctagaggacctgctccaccacttaaaagccatgtacctcttgaagcctgtttcctttatttccaacacaggaatttttatatttacaccctaaccatcacatgggtcacatgtgataacaatgtgcaagtttcttacaagtgttctaggaatctgtaagtcttagagttctgaggtttattcccaaaggacaggaaattgtgggttacaccaaacagttaaacagggtggcagggaatccctgtcacgtacccaggcctttgggttattttctagggtgaggggacatggccagtagtacaaagagcatgtgaacgcatggatgtgggtgtgtgaggtcatgagtgggtgtgtatgtttatgtacaacacatgtattggaggataaaagggaaaataatttgtcttcctgacttcttctctattcctggcttttcttagattgttattcctctctaaacaaagcttcaaaacagaaacccctccccttctttattatatcggaaatctgggaattcagttatccttgtcttatcctactccctgttctgttctaaatatataataacaataagtaatagtactactactagtactagtagtagtagtagtagtagtggtggtggtagtaatggtagtaatagtaagaggatgaaaagatggaggaggtgaattggaaatagggaggtttcctgtagctgactgacagtttatatagcaaccgcctgcagatttaggttttttctgactgcgcttattttatagcaacctcaacaagctgtgacaacctgcaatatctttagcccttaagatactgtctcttaaacctgaccaatatttcttatttctcaaagagtaatgatagtcttttctgtctgataagttcaaaaggcacaactgattttcctaacattttcctcaaatgaagggagtatttgaaaaatggaactcaaatgaggagccacctcagaagcctaactggagcattcagactgcatcagacagacttggcttcagttctgacactgatacttactagctgtgggatttttggacaagcttctcatctgtaaacaagtataaatactacctactttataagctcgtatgaaaattcccacaaagtttgatgttagtttcctttctttttgtgctcagctctaaaaatatgcagtgtagtgagtcactaatatttcattaacataagggaaaactatatacccaacccaaaagctgagattcttcagaacattttttaaagaggttctaattaggaattttataaatggaatacagagtactttttaaataataataacaatgattaatttaagttactaaacaaaataccttaatgaatttgagaaaaataaactgaagataaatattaattattaaaagagaaaattattaaagtaataacatgcaagtcacttgatacttgcaaagtaacacagaattagacataaagccacatttaagaggcagcaaagccaaaatggctggccccctttaaaaggctcttggcaacagacatatggaaaactgtcatctcttccctgggcctttcttcctactctggataagcagcatccttcacacaaaagaacatccaggataactaagaaagagatgaaatgatttatcggaactagttaaaataattaaatcttaaaagcatgttctcctgggcatagagtggggtgatttctgcaaacattttgaaaataaagtacccctaaaacaaggatttggtttaactgctagaaaacaaggtgacaggttgagaaaactgaaaattttcttaaaatcttgtttacttgaatggtgagccagccacccagggaagaaaccagagctctttcctttaagaaatatagacttcagttggaagaaaaaattagtaggttttaaccttcaaccttctagtgaagtgagaatattgattgagcacctattattagaataaatttatcttaagtgacccagggaagggtcgtgggtgacgggaactgtcaagaaagaaaaaaaatatggctgtggatcttaagtacttaaaatctactgagggctcttgtctccattttccttagaccgtgatgttgctcaaagtcacataagagggcacataaatttactgaatagtattacagaaagcagcagtgacactgaaatgcttgcattatattcactatcccagtcatctgcagttgcctgagggatttgcaagcaaggacaggaaaatgctagtaccaaccagttctagataaagaatttatttgctccaaaaactttcactgtattaaattaaattagattggctggaattaaaaggtaataaggcccattttcttatgtaggtcatcaattaatttaactctaaagataattccaaaagaagaggtttaaaaattgtttgagtagtagtaacatcattggaatttatgtaaaacttcccaatgtactcacttttacagataacatatatatatatatatatatatatgtatgtctatgactgctggcataatgatcaaaatgatcagttttattactttgtaatcacatcaggcggcactgatggttgaaataaaatgtgttagatgagtgaatgcaaagataacatatagcaaatgaaagtctttgtctatgaagcacatgattgttataattgttgctgcccttttgggatcctgaaccagattccccaaataagtaggtaacacagaatttgtcttgagcactttttcaagcattgtaatccatgcattgaagtaggctttatcagcctacagctataaactccaaggtgattttaaagtctgaaggtttataggtcttcattaggataagctgggcttaccatataaatctatgaggactttgctagaaaaatagtggaattgttgaatagggaaaagagataatggtaacgggatttgcctgatgtcttcatcctagaaaaaaagatttctgcttgggcattaaggaccccagtgatgattctgggagactttcaggaatgctgacaaggctggagctactcaggatttgatgccaaagaagccacactgcacatgtgttcctctaaggtgtacttggttctcatctgagaggcaaaggctctacttctttttaattgtttggtcctaagttaccttcaaactccacctaaccacatctctaatcctgtgtatagcctttccaacatcttgtaaattccaaggggttgggggaacctttaggttccaaggctgagctaagttataaatgaataccctgtgcagtgttgagaatgaaacagaagctttggtgcgtggtagcccactgtgagtggggtttcaaaggagcagtccaggggccctacatgaataggcatatatgggccaagagacaggcttctctcagccataccatagtatactggaacaatgagaaatgggagaggacatacttcttaaagtgacacactgacctgttttcattctctcctctctctgcttctccatttccacttattgcccctattgcatctgtccagtaactgtttctttaacagttttccaaactgacattattaatccagaagatggatggtggttttttaattaaaagagaaagctgattttatttggtgagacttctgctatcatcttcagtgttatatcccaatatgagtactttttttaatgttctactaaatccaatagtatattcacctcactctcgagttaaactcttggctttaaaaaaattagccagaaaaacttcttaagaaaaaatacagtattttaaattctataaatgaactatatcttaaaatatttgggggcataattcaattgtatccattttactttaagatcatgcaaaaagggaaaggtatagatgctattttattgatatgctgctccatggatttcaaattcaacatcataagccaagatttgtgggaccagaggaatgttcaaaagtataatctgatacattatctgctgcaggaattaagtaaaatattgcatacatctcacttcctataccaaatagagagaatgaaagtactagattttgtattacagatagtttagacaactatagggaattctgaactttcaaacttttatatcctaaactcaagatttgggccttgaaaaataaaactgataaaactgctacagtgtagatttttaaaattacattcatgtggtgaagttgacactttctgttggtatggctagaagtcagatagatgcttaatttgaaagaccatgtttttatttcttctctttttcttaccctatgatttcattgacctgaagtggcttttagtgccattcaattcacacagaagccaaaattggttactgtgttaagaagaaaccaagatgttttatttagtttatgaaacactagcaaaattactatttgatgcaaaactgtgaggaagttttgtagtcattgaaaggagcaagaatatagactgcttgcagttccagtgtcgagacattcattatcagatttaccacttgaaaatattatcaagatagtatttatattgtgtttaccaggtaaactaagcactttagttctgagcactttacatattttaaatcattaatagtgctgtaacaagcctctgaggtaggtactgttatccctctttaacagataaagagactgaggcacaaggaagagaagtgacttgctgaaatcacacacagctgaatgtggaccctgattcaaatccacacatcctgactcaagcatccttgctctgtactactgtgctacagtgcctctttacatcctcctgatgtagaaatcttcttctagaataatgagaagcagtgtgaactttgaagtaggacttcctgggcatggtgctttccatctctgggccaaagttttctcatctttacaaaaggattacgatcaacccccatctcatactgtggttaggagaattgagcaagaccatatactaaaagatgtcagaacagggcctgacagatcatagtgcccaataaacattggctcttgttatcatcataaatatgttaaaatgagctttagtatgtggataatagtagcagaatttcctgaatgagacatgttaaacatttattaagcaggcactttttggagtttatcttataataattcagtaaggttactcttgtcatccctatttcactgaatttgaggaatctcaggctgcaagataacgtattagttttctagaatcaaataagcaaggattcaaactcaggatatattgaccccaaaacctcagatctttctgccatccctatcttgttctaaaccccaggtttgctcatccgggccctagtcattgatcaaaaagcaccaatacaaatcagagtagagaaagtcatattgagcttgtgaggttgtattatgggcatggtaacaaatgtaattcagctgtattggcacagtgcataacaaccacacttaatttctgtcctaagacctgtctgagcccataaataaagttacattaataattacggaatggtaagggaccactcagaaaatcttggttgatataggaagtggcatctgtggcttctaattgagagatattgcttcttgaatcagtgctagaccattgctctagggggatattaagccttctctgtccatggaagatgtgaaattcaacagctgacctgactgcttgtcgctgttgatgatcctataaaatttcctctaagatacgaactctgtgttctagtccaaatcaagtgaatatttcctgttggttgacctacaacttcaagggtatgaggtcataagtttaaaaagattccttttctccccagtgttgtaagagttattttagttctatcaaatgctcccagtgagtactgcatatttcctttttgccagatacattagctattcactcttttttcctatctcttctatgcttttattttttccctcatctgtttaaccaatggtaccctgaattttagaaccagacaggtagtaggacaaggcaggtgaaaatgcacaggttgtaaatttcagaatgcacattcaaattccatcgttgtctcttactaactgaatgaatgtaggtaagatgctttacctctcagagtcttacttaccccatctataaaatgagaataatacaaactgtcttctgtggttttcttgagcattaaacgtctctatttatggaacatagtttcacatagtaactgattctgtaccaatgccctgccccccatgtaggcaaatgcatgtcccgaaagacccaaaacaagttgtccctcttttcaagatgaagatttgtaatctctccttaaacttatccagttctggtgtttaatttcctttataagccagaagttgttttacgtctcaccaaatcttataacatgaatattacactgtcttccaaatgtgagcctctaattaccttaggccaatagcagagcctctgatcttgtcttttctccttttccgcttaccagacagcacattctgcctgagagttgagacccaaaaagatataaatcaactagggggcaaaaatggagtttcctaagcttgtcccagagtttgactcagtagcctgaggtggagttcaggggcttgatgttaaaaacaagctaccccagtggttttgctgcaggtggaccagactcccaagaccacattttgcaagcactggcatttaggaagagcacgtacctactctagcagagtttatgcagactatgattgcagcctagtttgtgcagactattgattgcagccacttggcaaggctctataagaaaaagcgagccaacatgtaagtaaattatcatggccttgaaactcctcatctgaaagggtttcctctcatcccctcatccccttgtgtctgcccctgaatgccagactatcttctccagccccaagtcaacctctcatttttaagccattcctcattctcctatatagtccaaaatagcgaatacatttttaggaattctcttgctttatggacgttcatccaaaaatatttcattatgagaataagtgcttagcttatcctgtagtgtctttctgctctaatatttgggcccttcctttccacatagttgcattttctttgacgggcagatgctgctcctttaatatttttcacacctttgtgcttctaacagagcaattatttcaggatgagggcacttggagagctgtaagaggataaggagcccagggctctgccttggatttgtgtacctaaatgttacctaattagataaacctgaggaagatgtggaagcaaagtagaatggaacagaaagtgtttgaataataagaatttggacattgctgctccgtggtgacattggcagactctaagcctcttgcctcattttattcattcatgtatgacggggttatgctcagtcataagtcactaaaatttgtattctacatcccattagtaaagtaatttttgaacacatgatacatatgtttacatatttgtaagttatatatatgtacaaggttctaatatattctgttcattgtcaaacataaaatatatataaatttggtttaatataaaatataaaattggcattagtagacactgtctaccgaaatgagacactgtctcatttctgaaaaaagcacaatgtatactaagttaaaggttcattcttaacagcagtaggagtagatctttatttcaaatagtctttgggataatttcctattttggaagacagcttatcagatttggttagagttgatgaaagcttattctagggttaagaaaagtattagcccagccattttcttattgttgatttgggcttgcataattagttttaccttcagtatgaagtttctttacatgaatctttttaactcacttatttgttatacaattattagttaaatcaattttaaatcagtataatctatccacaaaatcagtcatacagaacctgcaaaaaacatgttctaacatgttacatgaagaggtaactaaagatactacaaacaacccctctgaacggtaacactcccactcttcctgcaaaattcctctcatagcaaatgcaacatgtgactcagacacaggctgactgaaggctttatgcaactcttacatgctcaatattagaaaactttcatttgtttcctattttatataaacaacacatataaataaacattttagtatcttctcattacccagtggattgtcttgcatggtccattttgaagacagtaaactgtagcctctatttttatttaatttcaaatacctgtttgccaatattcacagccagctcttgttaatgttcttttctgtcctgtgaatcctgatgtcgtatcttgcaacatcacctctaaagcctatctttgcactcctgtccatcccccattctctattattatgctgcctctgatggccagagaaaaaaatcttgaaaatatatattgtattgccctacctggcgaggaatcagcagttatacaattcaaagttgcagcaattcaccacattgtttagcaccctactatgtgtaaggaggaagcttgatttaaaaaatatatacaatcatgccttcttcaagaatgttttggagcatgcaagagcttaatgctcatggacatttactttattccagcaaatttagacccaatctctgtgtagtttcattttgttttccatttcctgattaactgactatatatctagctacttatttgctgccatctagtgtaataaagtatgttgattatacaaggaattttgagcccattatgtagttgaatatcagtactcaaaatgattctttttttctggtttcttataagtttacaaaatgcctagtcagggacctttcttatcactgtaaccctgaacatggtcttaatcttgtgtcatagaatctagggctcaggatcaaccttcgttcattttctataaatgtgacatttggaaactgggtaggggcttagcagttggtggatatgaagtaaatatataagagtaatcattaagagatcatctcagtttagtgaccatgattttttcctcatggaggcagcaaaacacagcatggattcttaccagtagtgtgaccatgggcaatttatttctctcttggaggcatcattttcttcatatctaaaatgaaatggtaggtccaggtgactgttaaggtctcttctagctctaagagtctgtgtctacatataaatgattttctctgccaaagtagtgtttttagagtcctttttaatgccagaaatgaatacggcttctctagttcttctaagtggccatctatcctttggtgatggttagaagtaagcagagatcctggctagaaagagagagaggaaaatgtggaccatgattttattccttttattcttgagagttgtccaatgggatattgtccactagtggataagtagatacttgccaatatgcacctgacctcttctcttcactcataatgggaatttagaagtataatacctgttataatcaacttcctaatctctatcccttttttgtcactctatttcctactgtaacttctctatgaagtactataagtctacagtaacatactggtgtttccctttccttatgaagttttatatagctactccagtatatcctaaaatgttcctttttcttgcttttatagtggagtcttgcttgttggccaggctggcctcaaactcctgagctcaagtgatcctcccacctaatagtagctgggtattcttctgagtaggtggtcctaaaatgttttattttcagcttatttcataggtataagtcttattttcccaaccaggctgaaaacttttcagaatcaggacttgtctttagtttctcattttttatgaggggatgtggcattattgcttagggaattcagatatttctgataataaagatgcttttctgtttgttcatataaattagggtaaaagaggaagtacaaaactatctcaaatcaagtacaggactcttaattattactagctatctaacagctcatagaaaccgataagtttctgaacctaatgccaaaaaaaagcaaccttaccataaaaagaaaatccaaataaaactgaaagaggcagtgggcagtgctacctatgggaagaaaactttgaagtgggaaaaatctggattcacatcccagctttgctacttattacctttgtgttttggctaaaaattatctaactttcctgaagttaagtttccttctctgtaaaatgagggttataataatatatacagcatactccacagaagagttgtgaagatggaatgagaaagcaaatggcaaaaacttagcacaaagtaggagctcaatcaatcatggttaaaaagaacttttatccattgttatttttgcttatatacagtaagaattatccaatgcaaatgtaatcagagcatctgcaattgagctttataaagtgaattataattctcataccatagtggttctcatcaagggtgatttttttccccccaggggacatttggcaatgtctagagacattttacttgtcacactggaaaagagggggtgctactggcatctagtaggtagagagtaggaatgatgataagcattctctaatgcacaggacagcattccacagcaacaaatgatctgatccaaaataccaatagtgtggaagttgagaaaccctaccataaagcctagggagtccattacttctgacctaaatttgttttatatttaagagtggatgtggattaaaagtagcttccattttggtaggttatgaagagagttgtctaatctgtgctttagattctaattttgaggcatatttttaggctaaggcattgcaatatataaggctttctaagtttcagacattttcttggaggtcaacaaatgaaggcttggggatctattaacccactagagtagtgtaataatggtggtggttgtttattgaagactaaccaagtgccaagtactctataataatctgatttatttttcagcaactgtataagcaggtattttgctctcattttacacaggggaaaactggagcttagagaacttatgtaacattactagcaagttgcacagctgggattcaaactgaaatccagctagcttcaaagactgtgttctttctgctgctgcatactacccctacctaccaaggctctgagattagaaagcaggatgggtgtgttttaaaggaaataaggtaggaaagttttcaaatattagaaactctgcacaagaagattaggtcaagtttcccactgaggggcccttgagtatctatgaactcgatgaaaactctgagcttctcaggaaggtagaccaaagggaaaggattcatcaaaatggatgttagcactatgccatgtgtattactccatcctcacacggccaaaaggacatacctgagactgggtaatttgtaaggaaaaagaggtttaaaaaagttctcttcgatggccaaataggaacagctccggtctacagctcccagcgtgagcgacacagaagacgggtgatttctgcatttccatctgagctactgcattcatctcactagggagtgccagacagtgggcccgggacagtgggtgcagcacactttgcaggagccgaagcagggtgaggcattgcctcactcaggaagcgcaaggggacagggagttccctttccgagtcaaagaaaggggtgacagatggcacctggaaaatcgggtcactcccaccctaatactgcgcttttctgacgggcttaaaaaacggcgcaccaggagattatatcccgcacctggctcggagggtcctacgcccacggagtctcgctgattgctagcacagcagtctgagatcaaactgcaaggtggcagcaaggctgggggaggggcgccaggcattgcccaggtttgcttaggtaaacaaagcaggcgggaatctcgaactgggtggagcccacaacagctcaaggaggcctgcctgcctctgtagactccacctctgggggcagggtacagacaaacaaaaagacagcagtaacctctgcagacttaaatgtccctgtctgacagctttgaagagagcagtggttctcccagcatgcagctggagatctgagaacaggcagactgcctcctcaagtgggtccctgacccctgacccctgagcagcctaactgggagacacccctcagtaggggcagactgacacctcacacggccaggtactcctctgagacaaaacttccagaggaacgatcaggcagcagcattcaaggttcatgaaaatccgctgttctgcagccaccgctgctggtacccaggaaaacagggtctggagtggacctctagcaaactccaacagacctgcagctgagggtcctgtctgttagaaggaaaactaacaaacagaaaggacatccacaccaaaaacccatctgtacatcaccatcatcaaagaccaaaagtagataaaaccacaaagatggggaaaaaacagagcagaaaaactggaaactctgaaaagcagagcacctctcctcctccaaaggaacgcagttcctcaccagcaacggaacaaagctggacggagaatgactttgacgagctgagagaagacttcagacgatcaaattactccgagctacaggaggaaattgaaaccaaaggcaaagaagttgaaaactctgaaaaaaatttagaagaatgtataactagaataaccaatacagagaagtgcttaaaggagctgatggagctgaaaaccaaggctcaagaactacatgaagaatgcagaagcctcaggagccgatgcgatcagctggtagaaatggtatcagtgatggaatatgaaatgaatgaaatgaagtgagaagggaagtttagagaaaaaagaataaaaagaaacaaagcctccaagaaatatgggactatgtgaaaagaccaaatctatgtctgattggtgtacctgaaattgacggggagaatggaaccaagttggaaaacactctgcaggatattatccaggagaacttccccaatctagcaaggcaggccaacattcagattcaggaaatacaaagaacgccacaaagatattcctcgagaagagcagctccaagacacataattgtcagattcaccaaagttgaaacgaaggaaaaaatgttcagggcagccagagagaaaggtcgggttacccagaaagggaagcccatcagtctaacagctaatctcttggcagaaactctacaagccagaagagagtgggggccaatattcaacattcttaaagaaaagaattttcaacccagaatttcatatccagccaaactaagcttcataagtgaaggggaaataaaatactttacagacaagcaaatgctgagagattttgtcaccaccaggcctgccctacaagagctcctgaaggaagcactaaacatggaaaggaacaacaggtaccagccactgcaaaatcatgccaaattgtaaagaccatcaaggctaggaagaaactgcatcaactaacgagtaaaataaccagctaacatcataatgacaggatcaaattcacacataacaatattaactttaaatgtaaatggactaaatgctccaattaaaagacacagactggcaaattggataaagagtcaagaaccatcagtgtgctgtattcaggaaacccatctcacgtgcagagacacacacaggctcaaaacaaaaggatggaggaagatctaccaagcaaatggaaaacaaaaaaagtcaggggttgcaatcctcgtctctgataaaacagactttaaaccaacaaagatcaaaagagacaaagaaggccattacataatggtaaagggatcaattcaacaagaagagctaactatcctaaatatatatgcacccaatacaggagcatccagattcataaagcaagtcctgagtgacctacaaacagacttagactcccacacaataataatgggagactttaacagcccactgtcaacattagacagatcaacgggacagaaagttaacaaggatacccaggaattgaactcagctctgcaccaagcggacttaatagacatctacagaactctccatcacaaatcaacagaatatacatttttttcagcaccacaccacacctattccaaaattgaccacgtggttcgaagcaaagctctcctcagcaaatggaaaaaaacagaaattataacaaactgtctctcagaccacagtgcaatcaaactagaactcaggattaggaaacccactcaaaaccactcaactacatggaaactgaacaacctggtcctgaatgactactgggtacataacaaaatgaaggcagaaataaagatgttctttgaaaccaacaagaacaaagacacaacataccagaatctctgggacgcattcaaagcagtgtgtagagggaaatttatagcactaaatgcccacaagagaaagcaggaaagatccaaaattgacaccctaacatcacaattaaaagaactagaaaagcaagagcaaacacattcaaaagctaggagaaggcaagaaataactaagatcagagcagaactgaaggaaatagagacacaaaaaacccttcaaataattaatgaatccaggagctggtttttggaaaggatcaacaaaattgatagaccactagcaagactaataaagaagaaaagagagtagaaaaataaaaaatgataaagaggatatcaccactgatcccacagaaatgcaaactaccatcagagaatactacaaacacctctacacaaataaactagaaaatctagaagaaatggataaattcctcaacacatacaccctcccaagactaaaccaggaagagttgaatctctgaatagaccaataacaggctctgaaattgtggctataatcaatagcttaccaaccaaaaagagtccaggcccagatggattcacagccgaattctaccagaggtacaaggaggaactggtaccattccttctgaaaccattccaatcaatagaaaaagaaggaatcctctctaactcattttatgaggccagcatcatcctgataccaaagcctggcagagacacaaccaaaaaagagaattttaggccaatatccttgatgaacattgatgcaaaaatcctcagtaaaatactagcaaaccgaatccagcagcacatcaaaaagcttatccaccatgatcaagtgggcttcatccctgggatgcaaggctggttcaatatttgcaaatcaataaatgtaatccagcatataaacagaaccaaagacaaaaaccacatgattatctcaatagatgcagaaaagttctttgacaaaattcaacaacacttcatgctaaaaactctcaataaattaggtattgatgggacatatctcaaaataataagagctatatatgacaaacccacagccaatatcatactgaatgggcaaaaactggaagcattccctttgaaaactggcacaagacagggatgacctctctcaccactcctattcaacatagtgttggaagttctggccagggcaattacgcaggagaaggaaataaagagtattcaattaggaaaagaggaagtcaacttgtccctgtttgcagatgacatgattgtatatctagaaaaccccattgtctcagcccaaaatctccttaagctgataaacaacttcagcaaagtctcaggatacaaaatcaatgtgcaaaaatcacaagcattcttatacaccaataacagacaaacagagccaaatcatgagtgaactcccattcacaattgcttcaaagagaataaaataactaggaatccaacttacaagggacatgaaggacctcttcaaggagaactacaaaccactgctcaatgaaataaaagaggatacaaagaaatggaagaacattccatgctcatggataggaagaatcaatattgtgaaaatggccatactgtccaaggtaatttatagattcaatgccatccccatcaagctaccaatgactttcttcacagaattggaaaaaactaccttaaagttcatatggaaccaaaaaagagcctgcatcgccaagtcaatcctaagccaaaagagcaaagctggaggcatcacactacctgacttcaaacaatactacaaggctacagtaaccaaaacagcatggtactggtaccaaagcagagatatagatcaatggaacagaacagagccctcagaaataacactgcatgtctacaactatctgatctttgacaaacctgagaaaaacaagcaatgggaaaaggattccctatttaataaatggtgctgggaaaactggctagccatatgtagaaagctgaaactggatcccttccttacaccttatacaaaaattaattcaagatggagtaaagacttaaatgttagacctaaaaccataaaaaccctagaagaaaacctaggcattatcattcaggacataggcatgggcaaggacttcatgtctaaaacaccaaaagcaatggcaacaaaagcaaaaattgacaaatggggtctaattaaactaaagagcttctgcacagcaaaagaaactaccatcagagtgaacaggcagcctacaaaatgggagaaaattttcgcaacctactcatctgacaaagggataatatccagaatctacaatgaactcaaacaaatctacaggaaaaaaacaaacaacaccatcaaaaagtgggcaaaggacatgaacagacacttctcaaaagaagacatttatgcagccaaaaaacacatgaaaaaatgctcaccatcactggctatcagagaaatgcaaatcaaaaccacaatgagataccatctcacaccagttgttagaatggcgatcattaaaaagtcaggaaacaacaggtgctggataggatgtggagaaataggaacacttttacactgttggtgggactgtaaactagttcaaccattgtggaagtcagtgtggcgattcctcagggatctagaactagaaataccatttgacccagccatcccattactgggtatatacccaaatgactgtaaatcatgctgctataaagacacatgcacactatgtttattgcggcactattcacaatagcaaagacttggaaccaacccgaatgtccaacaatgatagactggattaagaaaatgtggcacatatacaccacggaatactatgcagccataaaaatgatgagttcatgtcctttgtagggacatggatgaaattggaaatcatcattctgagtaaactatcgcaagaacaaaaaaccaaacaccgcatattctcactcataggtgggaattgaacaatgagaacacatggacacaggaaggggaacatcacactctggggactgttgtgggggtggaggagggggaagggatagctttaggagatatacctaatgctaaatgacgagttaatgggtgcagcacaccagcatgccacatgtatacacatgtgactaacctgcacattgtgcacatgtaccctgaaacttaaagtataataataataaaagaaaaaaaaagaaaaagaggtttaatggactcacagttccacatggctggtgaggcctcacagtcatggtagagggtgaatgaggagcaaaagcatgtcttgcatggcggcagaaaagaaagcatgtgcaggggaactgccctttataaaaccatcagatctcatgagacttattcactgtcatgagaacagcacaagaaaaacctgcccccatgattcaattaccttccaccagctccctctcatgacacatgcggattatgggaggtgcaattcaagatgtgatttgtatggggacacagccaaaccatatcaccatgacatacaatttgccgattcagcaacagttttcaggtcttctatttttaagcctaatgcaatatattttatgaattcttcctatttatgtttttccttttaaataagttctactatcttaactatcactttcaaatataatgcaagctacatatgccattttaaattttttagtagttacatttaaaaagagggtgaaattaattttaacaaagtaggttatttatcccaatatatccaaactattatcattttgacatgtagtgaagctaataaaagcattcattgttaatgatctatctcttacattattttttcctaataaatcttcagaatctgggtgtgcattttaactttccagcacatctcaactgggatgtgaaattttcagcaattaaagtgaaatatagccctatcaaaactattaatgttgcatttaggaaaaagatatttttcactctttttatttttaaatttgagtttaaattaattaaaatggaataaaatttaaaattcaattctctgtcacactagccacatttcaagtgctcaatacctacgaaagacccatggctaccatattggacagcacagatctaagctcttattgctcagaatgtggtccccagagcagaatcaacagcatctgtgaacttatcaaaagtgcagtatttcagttcacacctactgaatctgcattttaacacaatccccaggtgatgcttgttcacatgaaagttgtgtctctctaaatcgcagatcttttcaacaaagagcccagaaaaagcacatgaatcaataactgtgaggaataaggaaacttgccacaggagaatggtgccagggttggcattaatgatgtgctctggtgaaaagtcgtaggtttcccacaaaggcaaccatggctattctattgtttgaactgacacagagccattctagagcttggagttggctctgctcccagaatctacatcaaagaatctaacactaacttccatgactaccacaattaaggcagctgcacaccccaccactatatatatttgaaattgcaactttagaacccctgtaacacagccgtgagcatgtttctgctatacacaagtggaatttaaggtcgaacctccctgggagaccccaggaagatcacccacaagagtggcttttgttgtctgcctcactgtcatcctctgagagctaacacagacacagtcaacatcctcttatatggaggttggcccagatgcccctggggattcaatgtattctgcttcacctcactaatccttatttggtttgtttttcacagaactcagtatttgatgggcctttcaatattttcctttaaggaattcattgtactaatataacatagaagctcattgttctaataagtggtccccaatgttggctgcacattagaatcacctggggcattttgaaaaataccaatgcccaggcatcaccccaatctaattaaattaaacctgtggaaggtattttgttaaagatccccaagtgattacaatgtgcagccagagttgaaatccactggtccaattagaaggaggccttagctagcggtcaggtgcccaaggaaaggcatctcaagttttaatgcgcatacagatagcttgggatttgttaaaatgcagattctgatccagtaggtatgggtggaaataaacccatgtttgtgtacagatgtttctcttgtggtatgtggttggtaatcatcctcagtatgtttccatttccggcaaactgggttgagttgatgaccctattcttactcctccctgaaacctttgtctctccctcaggctcccagttctcattaatcactactttctgtgatattctgaagcaattattatctttaactgccttttttcattagctacttctctatctgcttatgtacgtgagttatttcctctactggattacgatcttcaaggtagatccaaatatcatgtcatttttataattctcactgcacctaaagagtgccttacacacaaatgccacttgttgattaattgaaacagggaatagctgatgtgatcatctcaaaaaatatccaaaagacttaaaaatgcaagatatttttctttgttggacagaaaaagaaagtttagataggcaagggggtaggagatattgaggctttcaatttttatttcactcggtacatatttaaattttgaagaattattttgtaatttagtgattttaattatttgttgggaatagggcactattgacattttggactagatcattctttgttgtggctgtcatcctgtgcattgtaatatgtttcacagcatccctggcctcaacccactagatgccagtatcaccctttaccccagtcttgagaaccaaaaatgtctccagtcattgcaaaatgtctcctgggaaactcattcatggttgagaacccttagtttagaaaaatggaagtgtgacacagctgtcttaccgcactaatatagacctgaaaaaaataaaaaattaaaaacatgcacataagagaatgacaagctatgttctgagcaatatgtgtatatataaatattaatataaaaatgttctctgttcctgcgttttggaggccatgtgcttgtagaccatatttatctttgtatttgtcatcttggtcattctctttataaaaatagaggtatattgcatgccaatgctcctcagcttatgaggttacatcccaataagcctgttgtaaatttaaaaaatcataagttagaaatgtcaaaacttgaaaatgcatttaataccctgataaacacatcataaagttgaaaaatcctaagtcaatccatcatgagtcaggaactatttgtatatgaaacatttttaaaatctgaacatagacttaggaattttaatatgtagtggtagtaattccaccaagcaagagaatacatagagcaaaaatcattaagaaacagtgactgagatgattctcattctcaggaaactggtccagcccctttacataaaatattctgttcagtgtgctgtgatccttggactgaatatactgttttagcaagcagagttgttaagctaaagcctgcacatcaacaggtgttcaatgtctgctgaataaatgaagaatgaatgaatattaactgcacctctaaaccctaaaattaaaaagctttaatgtgctcatcacaaaagaccctattttgttgcatttgaaatttcaagcttcaaaaatgaaattacatgcaaaagtatattatcatcaatgagaataaatggcctcaacaaaattacaagatagaaaacaaagtttcatttgtcagttggtttcttctggcaatagaaggctccccttagacttcattagcttcagatatttcagtgacagaaatttaatgttggcaaagcattgctatactttcaggcttggattggaatgccccacatttactttttcctaccattcctggctaaaaacttgaatgtgagaaccagacacaaggctctagtggtagcaagcagaatgtctcctaagctccaaggggaaaaaatgatataagtcagtggttcccaaattaaccatcaaatgctacccattaaaatcactggggaacttttaaaaattaaatgcccaactaacaacaaactgtatgaaaaagaaatttagaaaacaatcctatttttaaaagcagcaaaaaagtaaaatacttaggagtaaatttaaccaaggaagggaaatatctgtttactgaaaactatgaaatgttgatgaaagaaattgaagatggtaaaaataaatgaaaagataaatatgtatggattggaagaattaatattgttaagagatctatactacccaaagcaatctatagattcaatgcaatcctatcaaaattccaaagtcattctttatagcagtagaaaaaaatcataaaattcatatggaaccacaaaagactctgaatagccaaagcaatcttgaccaaaaagagcaatgctggaagcatcacattatcagatttcaaaatatattacaaagctacaatattcaaaatagcatgctactggcattaaaacagatctatcaactactgaaacagaatagtgagcccagaaataaacccacacatctatgatcaattgattttcaacaaagataccaagaacacacaatggggaaagacagtgtcttcaataaatggtgctgagaaaactggaaatccacatgctgaagaatgaaattagatccttatctcatcccttatacaagaatcaactcaaaatagattaaagacttaaacataagccctgaaactataaaactaatgcagaaaatatagggggaaatctacatgatattaatctaggcagaagtttcatggatatgacctcaaaagcacagacaacaaaagcaaaaatagacaaatggcattgcatcagactaaaaaacttctgtacagcagatgaagcaacaaatagagtgaagagacaacctacagattaggagaaaatatttgcaaatcatatattagataaggggttaatattccaaaaggtacaaggaaatcaaactactcaataacaagaaagccaattaccctattaaaatatagggatagcattgggagatacacctaatgctagatgacgagttagtgggtgcagtgcaccagcatggcacatgtatacatatgtaactaacctgcacaaggtgcacatgtaccctaaaacttaaagtataataataattttttttaaaaaaaagcaaaaattaaaaaaaaaaaaaaaatatatatatatatataggcaacaaacttaaatagacatttctcaaaagaagcaagtatcaccctgatttaaaacctggcaaagacacaatgagaaaacaaactacaggccaacatctctgatgaacatagacacaaaaatccttgacaaaatactagcaaactgaatacagcagcacatcaaaaagttaatttgccatgataaactagtgtgttagggtgttctagcatgctattaaaaaatacccaagactgagtaatttataaagaacaaaggcttaatttgttcatggttctgcagcctgtacaagcatggtgccagcacctggccagcttctggggaagcctcatgaaatttttattcatggcagaaggtgaaacaggaacaggcacatcacacaggggaagcaggagtaagagagagtgtgagggaggtgccacacacttaaacaatcaggtctcacaagtactcactcactactgcaaggacagcaccaagccataagggcccacccccatgattcaaacacctcccaccaagacccacctccaacattgggcattatatgtcaacatgagatttgaacagatacaaatattcaaactatatcaagtaggcttccttcttgggattcaaggttggttcaacatacacagatcaataaatctgactcaccacataaacagaattataaacaaaaaccacatgatttcaataggtgtgggaaaagcttttgataaaatccaacctcccttcatgttaaaaaaaaaaaaaaaaaccttaagaaactaggcggccgggcgcggtggctcacacctgtaatcccagcactttgggaggccgaggtgggcggatcacgaggtcaggagatcgagaccatcccggctaaaacggtgaaacccagtctctactaaaaatacaaaaaattagccgggcgtaggggcgggcgcctgtagtcccagctacttgggaggctgaggcaggagaatggcgtgaacccgggaggcggagcttgcagtgagccgagatcccgccactgcactccagcctgggcgacagagcaagactccgtctcaaaaaaaaaaaaaaaaagaaactaggcattgaaggaatatttctcaaaatagtaagagccatctgtgacaaacccacaacaacataataataaatgggcaaaaactggaagcgttccccttgaagacaagaaaaggatgccttttctcacctgttgtattcatgacagtacttgaagtgctagccagagcaatcaggtaaaagaaagaaataaaagacatcaaaatagaaaaagaagaaatcaaactacctctctttactgactatataattctatgcctagaaaaacctaaaggctccaccaaaaaagctcttggaactgataaacaacttcagtaaagtttctggatacaaaatcaatgtgcaaaaatcagtagcatttctatacagcaatagtgttcacattgagagccaaaccaagaatgtaatcccatttacagtagccacaaaagaaataaagtacaactagggatacatctaaccaaggagatgaaagatctcataatgctgcacaagtacagccatttaatcttcaacaaagatgacaaaattagcaatggggaaaggactctctagtcagtaaatggtactgggataaatgtaaatgtcagtaaatggctagtcagtaagtgatactgactagctatatgtagaagaatgaaactggacccctacctttcaccatatacaaaaattaactcaggatggattaattattcaaatgtaatatctcaaactataagaatgtaatattcaaatatatctcaaatgatatacaaactataagatatatattatatctcaagctatatacaaactataagaatgtaatattcaaatgtaatatctcaaactataagaatcctataagaaaacctaggaaacaccattctggacatcagccttggaaaagaatttatgactgagttctcaaaagcaatttcaacaaaaacaaaaactgacaagtttttctgtgtagaagctcttagtttaagaaaaagaaaccagcaacagagtaaacagcctacagaatgggtgaaaatcttcacaaactgtgcttccaaccaagatctaatatctggcgtctgttaggaacttaaacaattgagcaaacaaaaaacaaccccatttaaaaatgggcaagcagcatgaacagacagttctcaaaagaaggcatataaacagctaacaaacatgaaaaaatgtctcacatcactaatcatcagagaaatgcaaatcaaaaccacaataatatgctatatcacaccagtcagaatagctattatcaaaaagtcaaaaacaacagacgctggcaaggctgcagaaaaaaaagtgaacgctcatacacggttgctgggaatgtaagttagttcagccactgtgaaaagcagtttggagatttctcaaagaacttgaaacagagttaccattcaacccagcaatcccactgggtatatatccaaaagaaagtacattgtttcttttggatattgttctacccaaaagacacatacactcacatgttcattacaacactgttcgcaatagcaaagacatggaatcaacctaggtgcccaacaaaggtggattggattaaaaaatgtggtacatgtccaccatgggatactacacagcaataaaaaagaatgaaatcatgtcctttgcagcaacatggatgcagctggaggccattatactaagtgaggtaatacaggaacagaaaaccaaatactgcatgtttttacttataagtgggagctaaacattgggtaaacatggatataaaggtggcaacaatagaaactggggactaacagagtagggaggtagggagcagagagaggactaaaaaactattaggtactatgctcattccctgggtgatgggatcaatcataccccaaacctcagcatcgtgtgatatacccaggtaacaaacctgcacatttgttccctgaatctaaaataaaagttgaaattacaatttttaaaaggatagaaactagtcatcagcgtgttttttaattttccaggtgactctaacattcaataattattttaaataattatttctgtctgtagaccttctgccagctactaagtttcaggaattttgatggtctcattaaagagaacctgacaaccccacttacaagtgcttcagctaagtttcatttataatattttcatattgccaaggatccagtagtgtcttttttacagtgagttacaaattcctgtttttgtgacagtgacaggccaaaattaatgagctgtgatttttaaactgaaaaagtgactgtccaatagaggctaaaaagaaaactaaaattatattttgtcaattttagtgttaagtgtgattttttgctttgtatgttttagatagtttttttattgagataaaacccaaatagcataaaatccacctttttaatctcaaagtggtttttggtatattcacaatgttgtgcaacaatcactactatctaactctagaacattttcattacttcctcatggaaccctgtacccattagtagtcactcccagtttcccattcacctcatttcctggcaaccactaatctacttttctgtctctctgtatgtgactattcttaacatttcatgtaaatcagatactataatatgtggccttttatgtctgacttctatcacatagcaacatattttcaaggtcattcgtgttgtagcatgtatcagtattttattcctttttaagacaatactttattataggattataccacatcttttttatccactcatcagttgatggacctttgagttgtttctacttttctgttattttaaataatgctgttatgagcattcttgcacatgtttttgtgtgatcatatgtgtttgcttctctgggcatatacctaggagcagaattgcagggtcatatggtaactctgtatttaacattttgaggaacccccaaattgctttccccagtagctataccattttacattctgaacagaagtgtgtgagggtttctattacttcacatcctcttgctttctattttaattatttaattatttaatttaattatctaagatgccttttaccctaaccaaccagaaaataaacttgactgaatttagtgctaattgtttttgcatagtcattcagtataattgtctttgacatctcaaaacactgcttatgcagaatacacttttttaaaacagtgaaatcatagcaattctatttcctaagtcagttcttcttcagggtagtaagttataggtctttgaggtcatgttcctgtttccatcttccaaaaggcaacattattaaaatcttgttgctgtatctgccttggcatatccccctctctatccagagaaaagatcactgacagaatagtgtccccacctttctatcttagaggtctcattacgagtcagtatgcttttaaaagaattaatggataaagagctagacatcaagaagaagagagaaaattttaaataagacagaggagtgtatgatcactctttctaagatgattaaatgaaataatttgaaaggcaataaactaactgcaccaagtaaatcttgtgaaagcgaaaggaaagaggagaaggaagatttgagtgctgaaaaccaggataaattgtattcaaccaccagcattaagggaagttatacaatacattttatgaagaaagtgttccatgaaaataaaacaacaaaaagaaagtttggtgaaggtttaaatgataaatgccaatagtagtatatgtgcaattatctactgacactgctatacaaatgagctatctatataggctgtgaccacataacctcacctgccaaaccacagtactataaataaatacttttcccagacactacagagctcagttgacttgagattcatcttatggtaactggaaatgtagactgtgcctttatttgggtcaatcctacaattttctttaatgtaccagcaattcattatttaaagtttactagagtttaatttaaaattataaaaaaggaagaaattggctgggtatggtggctcacgcctgtaatcccagcactttgggaggccaaggcgggaagatcatgaggtcaggagatcgagaccctcctggccaaaatggtgaaacccagtctctactaaaaatacaaaaattacctgggcatggtggcacacgcctgtagtcccagctactcaggaggctgaggcaggagaatcgcttgaacctgggaggcggaggttgcagtgagccaagatctcaccactgcactccaacttggtgacagagcgagactccatataaaaaaaaaaggaagaaattaatagttcaggtgagaacttgtgaatttttattctcaactctaagctagtaagtgcttaaatagaagactttacaacgagctgtaccttcttaattctacagagaatcatgaggaaaatcaaatataaatgtgaatttcttatgttcagtattgtccaaaaagaaaatattttattaaattttttgtcagttgccatcattatttaaagccttcctgccagtagcctatactatttttggaatggagtgtttgcagtttcataaccacttgataacaccataggttaaaaaaaaagtctaccagtctttttcagatggcctctttgacaatgcattatttatagggaagttcagttacttttaacaataaagacaagccaaaagaaattacagatctcttttaccatattttgatatactagcagcatccactcaggacaggacctttattaaaagggggcttaaggtacttttaattggaggaattactgaattcctgaagctcttcaaacaaaatagcacttgggatatgacaagagtactttggagaaggctgcttggtcccaaagcagagattcaagaggaggactccagctagctgggtaaggggttccttcctctcaacctaagtgtttatgtaagcctgctgggggccaggaactgcgtaaaactcagtaagctcagtacttctcagcacagaatccagtcccaaggaagcacccagcaaaaatttaggttgaattttctttaaaataaaataaagaaaaaagtaaaattaaaaaaaaaatacaattcaactactcagcccattccattccgggtagttttggctcagaatgctggaagagttggataggctattagtgagagaactcaaaactccccaaactccacttcattactcttcctttatattttttctgaaaagagtattgccaatatatcaataaagctttttgctatgacttcagagtgcccaggtcactagggaaaagtatcaagtagcatcctgaatccacaaatcctttgagagccagccacacagtatctgcgtgagtgtggtaattctctacccttacgagtgtcatcacagaattgcagcattctcttttcattgtttctcaggaaaacatagacaaaggctctgcttggatttttttaatttaacactaatatgtaataatatagcaacatctcctagttatctagaactcaggctttgatagctgtgactgtctagaatacaaccacagaaaatcacctctgaacagtgagggaaatagctgccacagtatcaccacctactccaagcttgaacctctcaacccgcaaccaacagactgcaagtagttcagtacagctttgaatgcagcccaagacaaactcgtaaaccttcttaaaacattatgaaatttttttgcaacttgttcatcagctatcgttagtgttagtatattttttgtgttgctcaagacaagtctcttcttccagtgtagcccaggaaagccaaaagattggacacctatactttggatgtttcatctagtaccgatatacttataattacatgtttcaactagtactaatgaacttatagttacaggatgaaatttcaaattagcaatgttcatcatttgctcttcctaggtaacaacagttaacaaatcataggttgacaatcacaactgattgtgaggatggaaataataacaatgagcatttatataatgcttactctataccaggcacttttctaagaactttacatagattagctcacttaatctttacaataaccctgtgacataccattattatccccattttacaggtgaggaaactgaagaagttaagtaatttgcccaagattacagattgtatgtgattgaggtaggatttgaactcagcagtctggcaccaaaatcagcactctcagcctctacccagtattatcaaaagtaatttcctggtagcttctttcaattgtcatggcaactctcaagataaagaattattgtttttaataaataatgtcattcccagaaatgaattatgtgtgaatcatactaagctgcagtgagagaatgaatatcaccatcacagtggtgaatctacttagtgtaggggtaaaaggccagtctctcccagcagccctgcacataggtacaccgtaattcactaggataatccctgatcgccatgctgtcataaaaaaacgttaaatgatgtttaacaggtttcattaatgattcagagaatcttataatatgtcttaggaaaaataatttcaggagtaactttcagttagctagacaatacagttctgttgagcatctcataatctatgccagacaaaggaaacattcttgcctttctttgagggaattatagaccaacaattttattaattttcaactttcatcgaggcaagattagcttcatgaacaatgtttctcaaactgaaagtagtgacctgtattagtaaatcaatttatagggttgcaagcagcatcatttataaactgaaatcagaattcattgcaggcagtaattttgagacattttattttacatgtgcgtgtgtatatctatcatataaataagtatgtgagaacattttaaaacatttaaaatatatttatatatctaaagtttaaatgtaaatatatatttatattaataatataattaatatgaattaataacatattaattcatattaacttatattaatttatattaacaatatgtaaacaatatattaattagtaatatattatactaatattagtatgtattaatatattattataatatattatatattaattaatatattatatattgtatattatatattaattaatatattatatattgtatattatatattaataacatactattattaatattttaaatatattttaatatacttaaatttatacttaaaatttacatatacatataaataattttcctgaaagtcactttcaaaaactttgaaagccaccagtgcagtggttaagaatacaaattttgggctgggcatggtggctcacacctgtaatcccaacactttgggaggccgaggtgggtggatcccgaggtcaagagattgagaccatcctggccaacatggtgaaacattgtctctactaaaaatataaaaattagctgggcacggtggcacgcacctgtagtcccagctatgcaggaggctgaggcaggagaatcacttgaacccaggaggtggaggttgcagtgagccgagatcatggcactgcattccagcctggcgacagagcgagactgcatctcaaaaaaaaaaaaagaatacaaattctgaagcacagctgttgagttggaatcatggctgtgccacttaataaccaagtgactttgggccagttattttacttctctatgcctcagtgtcatctattcagtagtgagaataatagtacctaactcattctagttttgagaatgaacactttttatattacatataaaatgtgtaggacagagaccccaaagaagccgtagttgctgtcatattgttattctgttcctgcttaagaaggggacttggaaaaataatgatgttgaatgcagtaacttctttcactcatggaagaattacatattcacatcttctttgctcatcaaacctttgaagatcatgcatgtctcattctgtaacatcgccttaaccaaatataaaggctaaatacaaaggtgtttttaaataactgatacatttaggccagtcacacaaagattttacccaaagcctatgcaggcatagtccaagaagtagacttgttctactgcaatcaccatctcttgtttattatttgtgaaaggaacattatggtttcaccacagttggcctggccaacgtgcttatgcagtcctcagaacatatgaaagtgatttcggctgacaataagtatttcctcactttggcttatgttcaataatagccattctttatccagatcagggtgactgagcatgctgtaaccattcttctcttctaaaactgacccttgtttgactgcatatgcagattgcttagcagaacccatatccaccataacgggccaaaagtcatttgatccaatgtgcttttctttttttttcttttttttttaattccatgaaattttattaagataaattaattataaacattgcaaaacacttttttttttagacagagtctcactatgtcacccaggctggggtgcagtgacacgatctcagctcactgcaacttccgactcccaggttcaagtgattcttgtgcctcagcctctctgagtagctgggattacaggtatgccccaccagacctggctaatttttgtatttttagtagagacggagtttcactatgttggacaggctggcctcgaactcctggcctcaggtaatccacccgcctcagcctcccaaagtgctggaattacaggtgtgagccactgctcccagccccaaacatgattttttgattgaatgcttaatgtctttctattattattatttttttttattatactttgttctggcatgcatgtgcacaacgtgcagatttgttacataggcatacatgtgccatgttggtttgctgcacccattaaaaattaattcaagatggattaaagacttaaatgttaggcctaaaaccataaaaaccctagaagaaaacctaggcaataccattcaggaaataggcatgggcaaagacttcatgactaaaacaccaaaaacaatggcaacaaaagccaaaattggcaaatgggatctaattaaactaaagagcttctgcacagcaaaagaaactaccagcagagtgaacaggcaacctacagaatgggagaaaatttttgcaatccgcccatctgacaaagggctaatatccagaatctacaaagaacttcaataaatttacaagaaaaaaaaaaaaccatcaaaaagtgggcaaaggatataaacagacacttctcaaaagaagacatttatgcagccaacagacacatgaaaaaatgctcatcatcactggtcatcagagaaatgcaaatcaaaaccacaatgagataccatttcacaccagttagaatggcgatcgttaaaaagtcaggaaacaacagatgctggagaggatgtggagaaataggaacgcttttacactgttggtgggagtgtaaattagttcaaccattgtggaagacagtgtggcaattcctcaaggatctagaactagaaataccatatgacccagtgatcccattactgggtatatacccaaaggattataaatcatgctactataaatacacatgcggccgggcgtggtggctcatgcctgtaatcccagcactttgggaggctgaggcaggcagatcacaagttcaggagatcgagaccatcctggctaacatggtgaaaccccatctctactaaaaatacaaaaaattaggcaggcgcagtggcgggcgcctgtagtcccagctactcgggaggctgaggcaggagaatggcatgaacccgggaggcggagcttgcagtgagccgagatagcgccactgcagtccagcctgggcaaaagggcaagactccgtctcaaaaaaaaaaaaaaaaaaaaagacatatgcacacgtacgtttactgcagcactattcacaatagcaaagacttggaaccaacccaaatgtccatcagtgatagactggataaagaaagtgtggcacatatacaccatggaatactatgcagccataaaaaaggatgagttcacgtcctttgcagggacatggatgaagctggaaaccatcattctcagcaaacgatcacaagagcagaaaaccaaacaccacatgtgtgttccaacttaactcattgttcttagtgataattcacttaggggcaaagttaggctctcttgttaattgcaacattcctttcagaggtgctataaatggatgttgaactatactatttttagatttaatctttaaaaatcataagaaagcaagaaatattactagttcagaaatgattttctgttcctggctaatcagagaagacctaagagtctatagtagtcatttgttgtcttcgtagtaaaagtaagattctaataggatttttagacatagtgagaaaggtgttcattttaagattatggtagttcctctcagatttagaaagccttaagatgacactaaggagttggactttaggaatgctgagtgtcttcagccacagcggcacaatggtactagatgtgacaggatgtgattaaggagaaactaaacggccaggcacaatatagttcttcttgcctccaaaagaggagtcacccactttctcacactcactgtgatacattccatttgctaagaaaagtggcttgtgtcattcttgagcactacttttaagttctgatatattaaattcatttactctgtattaatagcattcaaatatttagtaaagttaatatacctctcacactttttccaaagtaacccaccagctgtgtcctgtgcttcaagctatcttataagactgcaatcaaagtgtcagccagggctgtggtctcatctgaaggctggatagggaaagattggttcccatgcttatttacattgttgttggcaggattcagttcctcaaaggttttttttatttttatatatttttttttgagatggagtcttgctccatcaccagactggagtgcagtggcgcaatcttggctcactgcaaactccgcttcccaggttcaagcaattctcctgcctcagcctcccaggtagctgggattacaggtgcatgccaccatgcccagctaatttttctatttttagtagagatgggatttcaccatgttggtcaggctggtctcgatctcgtgacctcatgatccacctacctcagcctcccaaagtgctgggattacaggcatgagccaccgcgcccagccagttcctcaagggtttttatactgagggcctctacttcttgctgagtgttggccagaggccatgcttagttctctgctgtatggttctcaccacacagcaacgtacttcatcaaaaccagcaaaagggtgagtctgctagttaaaaagaagtctcaatcttttgtaacctaatcatagaactgccatccactccatgctgccatattcttctgattagaagcaagttactcaagggaaggaaatacataaggctgtgaatgagagaagacaggaatcattggaggctactttaggggctgtctgccacagcacttaacagcacatacccagccataaaatttaaaaaagccggaaagagagaaggagggtgcagggtaaaataaagaaaagaggaaggtggaagggaagaaaggaagggaaagaaagacatttaaaaagacaagaacaaaacagctctgctgcacaacatctgtatcggagttccatgtgcagacacacacgtcatcacatcagcaccacacccataaatttcctatttcttatttacaatgagaaggtaataaggactttctatgcatctggagttaaaaggaaacaataaatctaagaatactaagtttaagtaatcaaaatgtgtttcagattagttattttttctttttaagtttttttttttgtttcagctgacaaagttttttatttctttctgtttcaagttttgaagttgagtttattattcttgctattatgtaacaggcatattttacagagaatataggaacctgattgacatttgtatttggtgttctattgttgtttcaattcaaatgccaaaattatgtttttgttgtgtacgttattgttcataattatatatgcctcttaattgtaaaagcgaagctgtaaaattgtaaagtactttgtgtctcatctattccaggcattctactaaggaaatcaagaccaaatggcttgggaaggtcaacgttaaatagtgtcagagccagaactagagtacacatctctcaatttctaatctagtgcatttccttttcttatttctgtgcaaacgaacagttagaatgtgaaatagtctcctcagatataccagcattaaaacagttgtggtttaaatatttagttttaataattactaactttgtagaaggacctaaaatagtgtttgttttcagtgcttcaactaatagtaaaaaggaatattttcagtgctttactgtatgagaggtgcttgcctaacgaaatacacatctttttcactgtactcatttgtaacagataatgtgggctcgtacacctcagtgttctgagaggggttggtaaacactgaccacatagagagagctgcccatctgccctcagtaccaaggcacatcccatccatgccctaaaactcttgtaaatttctccattcatacaggaaaatgagtatttcttacaacaatatgaccgtggaatttgattacaaaaacactcctgctatccccaacctgtgctcccagggctaaagacatatttgcaactcaggattttctgaagattcacttgtttgtactattgagggcaacagttgttctcaaacaaggatgcagttcctttcttcttaccctgcttatttttctttttattattattattattatactttaagttctggggtacatgtgcagaacgtgcaggtttgttacataggtatacatgtgccatggtggtttgctgcacccaccaacccgtcatctatattaggtatttctcctaatgttatccctcccccagccccacagccctcaacaggccccagtgtgtaaagttcccctccctgtgtatgtgtgttctcattgttcaactcccacttataagtgagaacatgtggtgtttggttttctgttcttgtgttagtttgctgaggatgatggtttgcagcttcatccatgtccctgcaaagaacatgaactcatccttttttatggctgagtagtattccatggtgcatatatgcaacattttctttaaccagtctatcactgatgggcatttgggttggttccaagtccttgctattgtgaacagtgctgcaataaacatacatgtgcaagtgtctttatagtagaatgatttataatcctttgggtatatacccagtgatgggattgctgggtcaaatggtatttctagttctagatccttgaggaattgccacactgtcttccacaatggttgaactaatttacactcccaccaacagtgtaaaagcgttcctatttctccacatcctctccagcatctgttttttcctgactttttaatgatcgccattctaactggtgtgaaatggtatctcattgtggttttgatttgcatttctctgatgaccggtgatgacgagcattttttcatgtgtctgttggctgcataaatgtcttcttttgagaagtgtctgtttatatcctttgcccactttttgatggggttgttttttttcttgtaaatttattgaagttctttgtagattctggatattagccctttgtcagatgggcagattgcaaaaatattcccccattctgtaggttgcctgttcactctgctggtagtttcttttgctgtgcagaagctctttagtttaattagatcccatttgtcaattttggcttttgttgctattgcttttggtgtcttagtcatgaagtctttgctcatgcctatttcctgaatggtattgcctaggttttcttctagggtttttatggttttgggtcttacgtttaagtctttaatccatcttgagttaatttttgtataagatgaaaggaagggatccagcttcagctttctgcgtatggctagccagttttcccaacaccatttattaaacagggaatcctttccccattgcttgtttttgtcaggtttgtcaaagatcaaatggttgtggatgtgtggtgttatttctgaggcctctgttctgttccattggtctatatatcttatttggtaccagtaccatgctgtctttgttactgtagccttgtagtatgaagtcagagacacaataaaaaaagaaaattttagaccaatatccctgatgaacactgatgcaaaaatcctcaataaaatactggcaaacctaatccagcagcacatcaaaaagcttatccaccccgatcaagtcggcttcatccctggaatgcaaggctggttcaacatacacaaatcaataaacgtaatccatcacagaaacagaaccagtgacaaaaccacatgattatctcaatagatgcagaaaaagccttcgacaaaattcaacagcctttcatgctaaaaactctcaattaactaggtattcatggaatgtatctcaaaataataagagctatttttgacaaacccacagccaatatcatactgaatgggcaaaagctagaagcattccctttgaaaaccggcataagaaaagaatgccctctctcaccattccttttcaacatattattcaaaactctggcgagggcagtcaggcaagagaaagaaataaagggtattcaattaggaaaagaggaaattcaattgtctctgtttgcagatgacatgattgtatatttagaaaaccccatcgtctcagcccaaaatctccttaagctgataagcaacttcagcaaagtctcaggatacgaaatcaaagtgcaaaaatcacaagcattcctatacaccagtaacagacagagagccaaatcacgagcaaactcccattcacaattgctacaaagagaataaaatacctaggaatacaacttacaaaggatgtgaaggacctcttcaaggagaactacaaaccactgctcaaggaaataagagaggacacaaacaaatggaaaaacatcctcatggataggaagaatcaatatcatgaaaatggccatattgcccaaagtaatttatagattcaatgctatccccatcaaactaccattgactttcttcacagaattggaaaaaaactactttagatttcatatggaaccaaaaatgagcctgcatagccaagataatcgtaagcaaaaagaacaaagctgaaggcatcacgctacctgacccagcttatttttctacataggatccccacatccctgcttttgctagaatggaaactagacaaggaccaacttttatcaacttgttcatttctctattcctagaacacagcctggtacaaaatttgcgtttaataatgtttgttgaatgaatttgaatgatggatttgtttagaaggtttataacatcccatgccttatgagtttgttgccagaggaaaaaagaagcctgtttttggttcataacatcaggtatgtaacctggaatttggaatcatgagtttttatgcatttgcttcatattatttatttttaagagatctttcaaagtattgacaaagatactttaagattgagagcctccctgataacccaggaatgagagttttagattaagtttacaatatgattgaaggctaatcatataaggagaaaaaaataagaaaaagaagagaaatttgaaaagaaatctccaaaatggccatggacatcagaacactgagaattcatacacaaaaatgtgttttgcttcatacctgtctgttgcacatctatacatttcatagatgcagaggaattttggctaaattcctaacacatgagaggcattctgcacttacttctcaaattagaattaacacatgagtatgtataagttgtttagagtgggcatctatttaatgagtttactggctgaatcttttaaaagaatgcaaacataagtgccttttatcaaaaatcaatgaaaagataaaaggccctgtagtgcatgctgtggttcccacactacatcccccacatccacctgatgtcatcacaactgtctatggtgtccatttgccactatgcaccctgccgggcagactcaggtgcctgcctcggcaaagaccctcagctcatgtgcaggtacagcctagaagtgcatgggggtgaacatctctgaggcacccttcaaccagtgagtactgggagcggtagataaatatcctagcctctcatctttctacacaacagtggtggtgcatattctacacagcttctcaaaggagcctcagagggattgggccccattagccactgtgataaccagctcagaacacacacatattagttgttctccctttccttcccaccctccccattccctgactgctagatccagaagtcatcttccagatgaactacctatatccaaatcctaatctctagctctggtttcttaaacaggtcctatgaaatgcttgaaataaaaggcaaaatggtttgtgtctagaatcaaaggctgacaatggcaagcaacaggcactaaaactatgacccaggaaaaatgcttttctggaagacatcggcattacctcctagacacggaatacactggcttcatcccagtagtttcttcacacactttagatacgtgtctcattaggatcacatatgactcacctgatttcatgccttgccttttctttttattctgcagattcttctaaggagcctaaattcaccaagtgccgttcacctgagcgagagactttttcatgccactggacagatgaggttcatcatggtacaaagaacctaggacccatacagctgttctataccagaaggtgccaccatcatgcctttctgattttcctctccatggatgtacctactaaagtacactgagtcagatgtactgtgggaatggaagtgatttgttgtgatttatgcaatcaatgaatattcattcactcatttattgaaaaaaatattaatcaagcccatcctatgtgctgagtactattttaggccctggagatatagcagtgattacaaaagacaaaatccctggtctcatggagatttccttccaatgcagggagacaggcaataaaaattgaattaaatgtcagctagtaatataggttattaagaaaaataaagccagaaagcagcatatcagcagtgtgtgggagtttgtgtatgtgcatgagaatgtgtgagagtgtgtcaaagtgtgagtgagagcatgtatggatacacgtgggcatgtgcatgtggatgagagtgtgtgtaaaaggcttgaatgatgctgaaatgcgtggtcctaggaggcctctctattgtggtgtcctagaccagagacataagtgaaacgggacaggccacgtgagtatctgggggaaaggctatgcaggcagaggaaattgcaagtacaaagtccctgaggcagtcttggcatatttgagggatgaaaaaggccagcactgaaggcacaagattgaaagtgaggagagtgatatgggaagggatcagagagttacttagggactgaccatgccaaacctcataggcaagggcaaggctttgaattttactttatttgtggtggaaagctgtaggtgtttttgaaaagatatatgctttaaaagatgtagctttgtttctaaccagataatacactccttctcttaaatatattcagtaaaagactgtagtactttttcatttttaccagtgaccctctaaaataacagaggaagggtgaaacaaagacctctcaatataggtaccatccaagttgtttatttcttccccttcacctggcattattttcatttttgtttactctcactgtgtatatttttcccttttttacattttaggcttaaacacttcattatctcctgttttccacccaacccccagagaaggcctaagccaagatgcagggttagtgaggaccctttatccttggctcaaggtgttcgttagtcagaggatgacattgtctatccaaccgaagagctggaatagggaaggaagatgcagccagcagttaagggtatgagctcagggctaacaaacctgcacttcagtgtagttctgcactttctcaccaaggaatactagggaaattagccagtttgtgtacaactcagcctcctcatttgcagaaaggagataatggacttgcctcatgacttcttgtgaggatcatatgagataacccatgaaaaatacttggcagagtacttgacacataataagtactcactaaatggtagctggtattcttcttatcggtagtatagtgataattttaaaataattatgatatagaaatccagttcctggactataaaatgactataaattgtataagaccatttataccagtaaattgttataattattttaattattggtataagagcattttaatgcagagctgctgcttaatttgcagataaaaaaatacttggagttagcaaccaagcagaccttccccacctttcagtataagagaggtctcttggatgaagtgaagtgaagatgaaatgtttgggcaccaagtatactatatttttccttaaggctgacaccacagagaggttggggccagtaaacagagttgatttctataaatacattcagacatgaagttagtatgtttgatgacacttttgaaatgtgtggaatcattaagttatttgtacaggcacaattagccaaactgtaaagaaaagtagcagaataacctcttaagctgggcccactttatgaaaataattttttgctacctcaatatttaccaaatttgatgagcaaaaagagaaatccaaaggaatgaagccttgataaatatatatcccttgccctcatcaatcagggtcacataactctgtccacaggcatcttatgcacactccagtcatttcagcatctctggttcaaatccaggatctacactaccaaggatgctgctgaaagtgtgactgggtaaagggaaacgttcagacatattcagaaagatgtcttagattttgccctggtagtgtttggaatcccaggagggtaagtacagcttcatgattaagtgccaacccaaacttacaaaattagatatttgtgttttttctataaaatataactattttgaatatcttagccaaactactatgagcccacagcccagtttatccaagaaggataaaactgagggattaggagtatcaggactggactggactgattagtgtacagttatatttgatttctcattgcccacttcacagagaagacaatacaaatgcactttctgactcttatcactgtttcttagaactcagttgccaggcaactcctgaaactatagaaacatgcttctcatccctgacacataaataaaactctgagatgattttatccaaagtcagagtcagtgggcagtgcagttgtttcagtttgctggcctggcctcagtatctaaagcacaacagaacgtgaacatgtcaggctgtcaacaggacagttcaggcacagccctacaggcagttgtgtgttttgcctggctctgctccttgccaggtggctggcagaaaaggcagcctccacatgttagagcagcagattcaaaacagtgtctgccatcctgtgatgacgatagtgccaaattcagcctctgagcttgcaggggactcaggatgaatgcacattacaggcatggtaaaaagaggctctgggaagcatgttcgagctgctctgctctcagctccttgcatgtaaatgctgtgtttttaaaggaagtgggcatgtgaacactcagtccttaaggctgtatcccccacctcttccatacccattcaaccccacttcaaaaattaccctggtcttaagagaaatttcattttctatacaaggttgtgtggaaaatcagtagggagaaagggcattattactttcatttttctttaacaaaagtattaaatttaaagccaaaaacgtgcgctttctgtcatgaaaacagctgcccttaaaaacataaatgatgttttatttttattacttttatctagttggttgtctttagatgaaaaacatttcttctgctctttattcttatttttaatgatagtctctttctatggttctcaccccttccatttcacaagatagtctgggagcaaacctaaagcacttaacttttgggagtaagagcagaggggagcttccatacattgattttggtcatctgtagagacattcaacccagagaaggcaagtgacacagtatctgttttatgagctaatttgggttcttgtctacatttaatagtttaaaatataagttataaatatttatttaaaatgaaattcaacattggttcatgaagaaagaggttggaagtagtgttttgaactagctgtttctgatccatcatgcttaaaataaatgctctgtttgtcctgtggagttcatggatttgggataatctaaacagggttttttaaacagtcctcatggggaacaaggtactgacatgcactgttgagaaattctgtgaatcatgaaagagctaatcttttagaaatccagacctgttaagcactaatctacatctttggaatatcttaatactttgagttttctaacttttatactatcacttatgctaagtacatttgatatcccttctattatgtgaaagcctcattttctgggcaattttcttacaactactctctttaatgcactcttacttaatttgaaagtaaatatcaaattaagcatactatagttcaatgaaccacccacctattcctaatttttttaacatttctcttctgactctacatacacacatacttacacacacacacacaaacacaccttatcttttcttctgccttttgcccatttactttttgcatcagagatgaatctctcattcaagcatatgcaactttttttttttttgagatggagtcttgctttggcacccaggctggagtgcagtggctcgatcttggcttactgcaaactttgcctcctgcgttcaagcaattctcctgcctcagcctacctaccgaatagctgggattacagaagcatgccatcatgcccagctaatttttgtatttttagtacagatggggttttaccatgttagccaggctggtctcaatctcctaacccatgatccgcctgcctcagcctccgaaagtgctgggattacaggcatgaaccaccgtacccagccagcatatgcaacttttaagagtctcaaccaaagcagcaattcactgtctcagaccctggagtctctgccatttaaatcccaatttccttccaacagctgaggagcagctgtctcaaggaccctctgatactacacaagttttctcctagtgccaagcagaccagcctgagaaacagctataagaaggaaataggcgtcttctcccagcttggcatcctttccttccaggccctgccttccctacaacctgcattgtcttcattgtccactgctgcccagcacccatcccacagagggatggtcccaaacctccacagtctggcctgtgagccacaggcgcctctgcctgcacagggccattcctacctcatcttccacaaccacagattacatggttttatgtccctttgacttatatattgtcttctcaattaataggctagtgaataacatggagatgatgaactacctcacccaagtagcaattctaatttaagaaaattttcctgtcattccattgccttttacttccattaccacactcatgcccatacttccttacctcaatccctttgacctctctgtttattcccttccttgccgtattgccatctattaaacttttacccatccttcaagaatgctaaaaacatacctccaccttgaagccttccatgaagagccagagcaatcattccctcttctgaacttttaaggaccctagagagcactactaatgagcacttacccacattgctttgtaatatggttttttactctttccttctgaggcaggaggaattccttagacatctatgaatcccatagtgtctgtcattatgttttagacataaccaattctcattaaatgtcaatagaatgaatataagaggcccaaaaaactactcagatgggaatttgagtcttattttagcctgaaattaggggaccacatcttacttatctttatatctgcacagcgttggtgctggatataatgcatcactctgcctggagcacacatcaacttgtctcctcagtttctttcaccataggctggtgaaacagccaggtctaaaccttcactgttctctgggaatctctagtttgggggtgattctctgtactgttttaatgaacatttttaaaatgtccctaagtctcagaaccttcatctatacaactggcataataaagtacctaccataggaatcgatttatgagcaggcatagcatattcattcaataaacggaagttttaccataggcagaagtaccaaacggcctcgtagcagtcgtcagacactgatgatactgtccactgatgtgatatgtctcggaaatgatgttactaaaatacctcttcacaaaatatttgtcttccaatttattgaatcagactatcaagcaccttacttggacttaagctacaacatgatttttggaacaattaatctttttttaacccttcattttaggaacactcaagaatggactcaagaatggaaagaatgccctgattatgtttctgctggggaaaacagctgttactttaattcatcgtttacctccatctggataccttattgtatcaagctaactagcaatggtggtacagtggatgaaaagtgtttctctgttgatgaaataggtaaatcacaggtttttgtttcatttgacatagttttagactaaataaatggggaagcctgcaaggtccaagtataatcaagtaggaagactttgtaacagtgttctatagatacatggagatctgttttacaggagatgggatcagctggtgaacaagaggaaaagggcagggggaacttaagttgactttaacataaagtagcctggcagtaaatgttgtgaagaagagaataggaaccttgtggagtcttttcctttaggatatctttgaagctgcgttgtgtttttatgttccactgcaaagggtgaacttaatatattcttaggatttcttacttcctaattatttgataggatccttatattcaaattcactgaaatacgttggcctttgacctctaccattgctgtaatcaaagcctagattttctttatcacaaagcataatcattctggaattttacatttacaaaacagccacagttactttaaagacatgtttattagatctcagaacaaatactggagacaatcagctcagtgaactaagtgaaagatccaaacagaggatcctttgcccatcatatggacacaaggtggaaacaaaacaaataaaacaaacaattgtaattagaatagtcatgtttataccttaatagtataaatagcaaaatagaaagaatcaaagaaggactttgagtagctgaaattagtgcctcaaaatctatccacaaaagctcatttgttgcttataggaatttctcgttgcttctcccaaatgtattgttctttttatgtggttttctaggcataagctgactggaagacataggagtatgtggctagaacttacagatagaaacaaataaaatctaataggctgactttaagggagaagattaagagaactgtatcaagcagtaaagataacccaattgctttgcaaagacaatttagtatgtgtcctaacatcactgggtatagctgttgagttgaaactaaatgggatagcagaatgggatagtagcaagaacactgggttaaaacccatgttctagccctgttctctgccaatagccagtcctactcatttacctggctgacatgcctgtcatgtgtcacgcactgttctggtggtggtggttatagaataagtacaatacagtcaaagagggaagtcaggcatgttcacaaataattgcagtgcagcgtgataggtgttagcctggaaatacgtggaatgcagagctgcaaaggtggtggccaaaggcgtgaatgactgacaggcctgagggatgaggaagggctgcacagagatggtgacagtttagttacctctgaactggaattggactctccctatttttaaaaaagtgatgacccacagtggtcaaaagcatgagtgagtattgtcaggtaccacagtggacttgcctttcagtaactactaagttccaacagtaacttagtagttacttagtaattacaacagtaacttagtagtcccaacatgttcagggactcaggagcagttaggaagccctcctagtcagctggagaaatcatcagtagttgtttgtgccccaaaaaggaatttggactttaactgtcacgaggtacctttgaggatgtttaaatagggaaattacttgaggatactaatagttaacagtcacaaaagtcttaccatgtgtcaggtataaaaaccatcttttgcaatcacactttacagataatgaaaccgaggcacagagcagttaaaggactagttcaagtcaaacagctagtagatagagctgggatttgaacctccagcctccatgctcttactcttgaggctttgcagtaccacttgtctctttattaatgctcagagaaattaatcttgttgcaatgtgaaacgtagattggagtgggacggactagaggtagaagaggttaaaagactgagatgatcaaggtaaaagattatgacaggtagctacaactagcacaatagttgtggggcaaggtgctgagagtgaaagagaacaaagaactaatgtaaccctggtagatcttgagaaagttgtcaatcattataagcctcagcttcctcataaaatatgtatgtatggtactacctcacagggctattctttggatttgaagtactatattagttagacatttgtcattcattcaattcattcagcaaatatttattatgctcttctctcaggccagtcaatgttctccatgctggggatagaaactgtcttccctggtgggatttaatcccaacgaggatggaaagcgacaatgctatggagaaatataggaaaggagaataggagtgttggagaggttgcagtgttgagttttcaggattggcatccctgaggcagtggcatttgaataaagaaggattggagaggataattatgtgtgtgtctcagggaagggcatttcagcaagggggcacgccagaagaaagatctcaaagtaggagcatgcttttcctcactcaatgaacagcaggccggcggtggagtgggcacagagtgagcgaggagactggtatgagaccaaatcgcacagacaagacagtcaaatctacccaaccattgccaaagactttggctttcacttggagtgaggtaggcagcctttggagggttttagatgatgagcgatgtgatctaacgtaagtgttaggataatcactgtgtcagttcgcttgaggattgcatggagaatagactggagggggacaaagaccaaaggggtacagtggggagacaaatgaagcaagaagaatgaaaaaggataatggccaggaccaggttattagtggtgcaggcggtgggacatggttggattctgttatatcttgaaagtacagctgacggaatgtggattagtgaggaaaagatgagccaaggacaagttcattgtttttatcctgagcaactagaggaattgagtcctcgttaacagagatggaaaagaggaaaggagagcaggttttggagaggaagagcaagggtttgtttggggatatattaagtttcagatattttttaaatatctcacaggagttgtcaatatagcatgtagatttatgtatagagataaaggagaggtcattattatgcctgtaatggtatctcacaggaggtcattgttatgcctgtaatggtggtaccaaatcttttccaaaaggaccttgtctcatatcctctatttttcaaatgcagcataagtaatgagttatagaaaatcttccattaaaaacaattttatagtttggtcactttaaacggttaagctttgattatcaggattcctgaatctccaacaaatccagaagggtgaggaattattgccattatatcggcatatgtagtttggccattttgcatatccttccaatttaattttcaaaatgtagtcatgattcatcaaattttgactctccctgtttttaaaaaggtggtgtcgaccccacagagggcaacagcatgctcctccaccataaggcctgttttcactgtgggtgcacacaagagcttccctctttggccaacagatttgacagccagtaagagctcctcactgtgtatatctgtaaagttatctccagtcaacgctagggatgcacactctgcaacactctaggtggccttctgtatatatggcagaaaaagaaagtaaattttactctgtatctgcaagtgattttcaaaaccctcagtaatgagatccaactagcaaaaatttaccaggaactctctagaatataaatttagacatagttcctagctttggaatccatatttttcttcatcagcctctgagaaattgtggtctttgaggtcctactaagcagaatgcaacaaattttcgtggaactgtagagtatatcaatagaacctgaggaaaacaatgtttcaagttgttcatgtgacagtcaaaaagacagaaaacactgaattgtcaccatttgtgagactagcataatgctttcttccttcttatgtcagaagaaaatatcacatgtggctaggaagatcacaaagctagggagcattagcagagtgtgcaggaagattgtatgagaagattgaagaagagtaaaaaaggataatggctaggaccaggttatagtggtgcaggcggtgagatatggttggattctgttatatcttgaaagtacagctgacggaatctgacggaatatggattagtgaggcaaagatgagtcagggaacaacacagaaatgaggtaaacagggtctctgcccccaggccatacatagttgcaagaaaaaaggtttctctacccctagttccgaagcagccccatgtctaaattctgtaagtctttctgactctctgttttttcagtttcaagtgaaaataaattcctttgccaaaatcctgatgcatttatgatatcagagcaaaaagaaatatacaacatggcagatcttgtaaatagtgatcagatgttttactccaaaaggaatttttgtaagggcttatttagaagttaaaaacaagtcatccttgagttaaaaaaaaaagttactctcttataaagtgaaagttataataagaaaaatattggaagaaataagagcatgaatgatcaaaaatgtagaaagtaatttggtcttctgagaagaatgccttccattaatattaaattgtgtctgtctgtgtactaatgctctgttgaattgcacagtgcaaccagatccacccattgccctcaactggactttactgaacgtcagtttaactgggattcatgcagatatccaagtgagatgggaagcaccacgcaatgcagatattcagaaaggatggatggttctggagtatgaacttcaatacaaagaagtaaatgaaactaaatggaaaatggtaagatgttgctacaccttacactttgacttttctttctatttcaacaaactctctctcatttatcattagactttcctttgacctaataccacatgttcatgctgtatgctccataatttcttaattgagaaaacattatttaaccggtaaaatattgtcttgaaattctgtaagacaggagatgcttatgtatatatggaggcctgtggaaggaaaggaaaactatttctccattcattcttgctgtccagtttaactttagagcaaaattatagactggccacttagctgtctttggggatgtggataaaaatgggaaagtttgtgatccagtcaacagtgactatggccaaatattttcccatgatttcagttgctgctactcaaaggactcccactaaaacaaattcatacgtgtctataggaaaacagagggagggaatttgtctcttagaggtttcagaaggatgttttgttacatacctcagagaagaatcaagctgagattcttatgtaggcaattagagagcatggtaccagttgacctctgaatccctctcttccttaccaagcatatggaactcagcattttgataaatttcacatggcacataacaagaggaaaaacaggagtatcatgctgctcccaatataactaattctaaatctgtctaaccacagccacagccacagccacagccaagccaagcagtttctggccactcatcaggtgatgcccagcagcctggcacagatcactcccagaattttgagacaccaggacattcagtgagccactgaaaaagatgccaattttgtcattagaggaaagttaagtttggaggaaatttgagtagttacaatactgggctttgaggctctattttctgaatcattttaatttagatatctgttctgtaacttggtacaaataaaatgcctgattggatgctaagtcaaacaagactgtctaaatccaagctacaatcaaacattatttaacaacaggtactgaaataactactatgcagaaggcactgtgctaaatgcctgaggtggcggttctcaaagtgggagccacagacccttgagggtccctgagaccctttcagggagttcagtactattttcacaatacactaaaatattattttattaactatgttgaaatttaacttaatggcacaaaagcaatgctggaaacactgctggcaccttagcatgaagcaaggcagtaggatcaaattttactaatagtcatgcactcccaatgaagaaggaagaaaaagccagtttcacgtttgaagttcttgatgaagctgtaaaaattgttaattttactaaacctcgacctttgagtacatagcttattaatattctgtgtgacatatgggaattacacattaagcatgtctgctgcgtactgaggtattgtatttgtcttgaagaaaagcgcttaaatgactgagttgccagctgaactagttgcttttattgcttggagcaccatttttacttggaagagccattgataaactggcagatggttattcatatttgaattggcaaacatttgtcaaaaaagaatgaggcaagcttgtcgcttcaagaaaaacaactgacagtattttttgcaatggaaaaaatttgacttttcaaagcaattcattttgcctttttcgaaaatttgtgtctccaaccgtgagcttgatagtgttttaatatttgaagacttttcttgaagagattgatggtgatattaatgaaagtgactttttaattatattgtgtaataaaatgtatgaacatttagaaaaatctacaactcagttaaccaatattttccaaattactaatacatgatgtaatcaaatcatgcatggggaaatgatccattcaaagtactagatagaatcgtgaatttttttaatgatcaaaaatttttttgtatatttattgtgtacaacatatttttttgaaatatggatacattgtagaatggttctatcacactaagtaacatatgcattaccacacatacctttttttgtgtgttgagaacacttaaaatctactcagagattttcaaaatacaatacataagcattaactatagtcaccattttgcacaatagatttcttaaactcattcctactaactgaaaattttaattctttcatcaatatctccttaactctgcaccctgcccacaacccctgataaccaccattcaactctctgcttctgagttcaacttttttagattctgcatataagtgagattatgtggtatttgtttttctgtctctggatcatttttcttaatataatatcctccaggttcatccacattgtcacaagtgacaggatatccttctttttttaaggctgatagcattccattgtatatacctaccacattttctttatccacttatccattaatggaacataggtcgattctatttcttggctgttataagtaatgaacatgggagcccagatattctggctcaacatactgatttcattttccttggatatatacttagtagtggaataatataatggatcacatggtagttctatttttaatcttttgaggaagcttcatattattttccatagagggtatactaatttacactcccaccaatagtgtgcaagggttcccttttgtccacattctcaccaacacttgttatctcttctttttttgaaaatagccatcctaacatctttgtgcactctatgccttctgtgagctgatagctcattgtggtttaaatttacatttccctgatgattaaagatgtcaagcatttttcatatacctgttggccatttctatatcttctttttaaaaatttatattcaggtcctttgcccattttttaattgggttattttcttgttattgaattgttttagttccttatatatttcagatagtaacttcttatcagatgtatgcaaatattgtctcccattccatagagtgtctttttactctgttgattgtttccttggcagtgcagaagctttttagtttcatgtaatcccgtttatctatttccacttttgttgcctgttcccaatggagtcatatccaaaaaatcattgcccaaaccaatgtcatggagctttttcctatattttcttccagtagttgtacagtttcaggttttacatttaagtctttaatcgattttgagtttatttttgtatatgaggtaaaataagggtataatttcattcttctgcatatggatgtccaattttcccaacaacatttaaagacagagtcctttccttactgtgtattcttagcacctttgtgataaatcaatttactgtaaatgtgtggatttatttccgaacactttattcttttacattggtttatgtcatttttatgccagtaccatgctgttttgatgactatagctttgtattatgttttgaggttggtagagtgatgatttcatccttgttcttcttgttcaagattgctttggctattcatagtctattgcagttgcatacaaattttagaattgctttttctatttctgtgaaaaatgacattggaattttgataaggattgcattgaatctgtagattgctttaggtagcagggacattcgaacaatattaattcttctaatccatgaacatgggctatctgttcatttatttgtgttgtcttcatgttttacagttttcagtgttcagatctttcacctttttgtttaaatttatttctaggtcttttattttatttttatttttatagatattgtgaaagggatttctttatttctttctcagattgttccttattagtgtatagaaatgttactgatttttgtatgttgactttgtatcctgcagctttactgaatttgtttatctgttctagcaattttttgttgaagtctttagggttttctatatataaaatcatgtcatctgtaagcaaggacaatttaactttttccttctcaattttggatgccttttatttctctcttttgcttaattgctctgactaggattttgaatcgagtagaatagagtagaggagttacattgaataaaaatggcaagagtaggcatctttgtcttgttcctcatcttagaagaaaagctttccacatttcactgtttattatgatgtgagtttgttatatatggcctttattgtgttgaaatacattccttctatatctaattgttaagggtttttatcatgaaaggatattgaattttgacaagtgcttcttctgtatctgttgagatggttccatggttttcgtctcggttctgttaaagtgatgtattatgtttatgtatttgtgtgtgatgaaccatccttgcatccctggaataaatcctacttgatcatggagaatgttccttttagtgtgcttttgagttagtttcctagtattttgtttaagatttttacatctgtatttatcagagatattagcccataattttcttttcttgtagtgtcctttcatggtttgggtataagggtaatgctagcatcaagaaatagtttggtagtatccccttttcttccactttttggaaaagtttgagaaggattggtgttccggtgaagcttccagtgaaactgtcaggtcctggacttctctttgatgacagactttttattactgattcaatctccttacttattattggtttattagattttctatttcttcaagaaagtcttagtaggttgttgtgtgtaggaatttattcatttctcatgcatataatttttcagaatggtctcttatgaacatttgtatttctatggtattggttgtaatgtctcctccttcatttctgattttgtttttaatttgggctttctctttttttattatttagtctagctaaagattggttgattttgtttatcttttcaaaaaaacttgtttcattaatcttttctactgttttaatgtgctaactgaaaagcacattaaaaggatcattctccatgatcaagtaggatttatcccagggatgcaaggatggttcatcacacgcaaatacataaacataatacatcacattactagaaccaaaaacaaaattatggaaccatctcaatattttctattctctatttcatttatttctgttctgatctttattatttccttccttctatgaactttatgcttagtttattctttttctggtttcttcaggtaaaatgttaggttattcatttgagatctttgttttctgatggaggcatttattgccatgaacttccattgctcttagaacgacttttactgcattccttaaggtttgctatgttgtttccatttttgtctcaagatatttttgattttattttttactttttaactatttttttaggttcagagatacatgtgcacgtttgttatataggtaaattgcatgtcacaggggtttaccatacagattatttcatcaccaggtaataagcatagtacccagaaggtagttttttgatcttcaccttccttccacccactaccctccagtaggccccagtatctgtggtttcagtcttcgtgtccatgtgttctcaatgtttagctcctactaataagtgagaatatgtggtatttgttttcctgttcatgcattagtgtgcttagcataatggcctccagctccatccatgtgactgcagaggacatgatcttgttcctttttacgcctgagcagtattccatggtgtacatataccacatttcctttatccagtgtaccattttctttattccatgtctttgctattgtgaatagtgctatgatgaacacacgcatgcatgtgtctttatggtaaaatggtttatattccttcaggtatatacccaataacgggactgctgggtcaaatgacaattctcttttaagttctttgagaagttgctaaactgcttgccacaatggctgaactaatttgaattattaccagcaggatataagtgttcccttttctttgcaacctcaccagcatctgttattttttgactttttgataatagcctttctgactgctgtgatgtagtatctcattatggttttgatatgcctttctctctaattattagtaatgttgagcattttttcttacacttgttggctcatgtttgtgttcttttgaaaagtgtctgtttatgccttttgtccattttttaatgggactgtttgtttttggcttgttgatttaaagttccttatagattctggatattagacatttgtcagatgtatagtttgcaaatattttcagccattctgtagattatctgttttttcagttgtttcttttgctgtgcagaagctctttggtttaattagatcccatttgtcaatttttgtttttgttgcaattgtttttggcatctttgtcatgaaacctttgctaaggcctatgtccagaatggtatttcctaggttttcttctagggtttttatagtttggggttttgcatttaaacctttaatccatcttgagttgatagtcgtacatgttgaaaggaaggggtccagtttcaatcttctgcatataactagccagttacccagcaccatttattaaacagtgttttcctcatttcctgtttttgtcaactttgtcaaatattagttggttgcaggtatgaggctttattttggggttctctgttctgttccattgatctatgtgtcttcttttttaaccagtaccatactgttttgattcctgtagccttgtagtataatttgaagtcaggtaatgtgatgcccctgggtttattctttttagttaggattgctttgactatttgggctgttttttgcttccatatgaattttacaattgttttttctaaatctgtgaaaaattacattgataatttgataggcattgcattgaatgtgtagattggcttgggcagtatggtcatcttaacgatattgattcttctaatccataagcatggaatgtttttccatttgcgttatctgtcattttctttcatcagtgttttatagttctacttataaagatatttcacctcctttgttaaatgtattcctaggtttctgtgtgtgtgtgtggctataataggctatgttaacctgataacaatttaactttcttgcataaaaaactctacacttttactccacataccgcccccccaaacacattttaaatttttgatgtcacacttacatctttttatattgcatatttcttaacaaattattgtacctagtattatttttaataattttatcttttaaccttcattctaaaataaaagtgatttgcatattaccatgaaaatattagacaggtaatgtgatgcccctgggtttattcattttagttaggattgctttgccaattgggctgttttttgcttccatatgaattttacaattgttttttctaattctctgaaaaattacattgataatttgataggtattgcactgaatgtgtagattggcttgggcagtatggtcatcttaacaatattgattcttctaatccataagcatggaatgtttttccatttgcgttatctgtcattttctttcatcagtgttttatagttctacttataaagatatttcacctcctttgttaaatgtattcctaggtttctgtgtgtgtgtgtggctataataggctattttaacctgataacaatttaagtttcttgcataaaaaactctacacttttactccacatactccacacacacacacgttttaaattttcgatgtcacacttacatctttttatattgcatatttcttaacaaattattgtacctagtattatttttaataattttgtcttttaaccttcattctaaaaagtgatttgcatattaccatgaaaatattagactactttaaattggactgtgtacttacttttactagtgagttttatactttcatatgtttttatgttactcattagcctccttttctttcagctaaagacctccctttagcagttcttgtaagataggtctgttggtgaggaatggttaatttaaatataacaaagtacaaaaagttcatcagtagagtttcaggtttcatttttccactaacctgtaagaatttatcatttgagttttagtctattgttaaacagaaatgttcacaattatgtgaaaagtttattaaaatattcctcattttcctcattatttatctgtgtgaggccaggttttattcatttacgaaaatagcacattctaatagatttaattcagaagcagttataaaaatacagtcatcttcctttaagtctgacattaaataaatttgcaaaaatgtaaaacagtatcactcttctcactctcttttttgttgtttgggaaagtacaataatttttatgaaaatatattatttaacaaaatcaatttattattttcagtttaaaaataaggattttaaaattttttcatttcaatttctaatactgtaaatagtgataggtataacccaactaaaccaaactctttaagattctcaaatttttaagagtgtaaaggagtcctgaaataaaaaagttaaacaacctagaaaaaaacaaagatataaatcagcatgttagcattcatcaattcagttaccatcatttcatccctaaaagccatggcatatagttacgtctcactgagccaccactttgaaactcccaccctgtgccaggtacttgtgagcatgtaactttgttaatcaactgttcagggctatatcccaacatggctttgttgcacttttcgtggcacctctgctaaatctcgttaggtagaccaaaggggtcagttaactttttctttataccttttattcatgatatttataagtttggtaatttacaaaggtcttggacaaagaccaggggcttatatataataatttatttatctcttgaagaaacaaacaatataattggttatgaagcacaggcgtcataagcagaaaacaggtttataggtaaagggggaagacctagtgtgtgtcgcttgcatcaggaattcatgttaccatttggcaatatgaatttgcttagcagtgtgcttttttttctcccccccacaggatcttgctctgtccccaggctagagtacagtggcccaatctcggctcactgcaacctccacctccagagttcaagtgattctcgtgcctcagactcctgagtagctaggattacaggcgcaagccaccacacccagctaatacagctaatttttgtatttttagtagagacagggtttcatcatgttggccagactggtctcgaactcctgacctcaggtcatctgccaacctcggcctcccaaagtgctgggattataggcatgagccactgtgcctggctgccctttttagtaaatacattttgcatgaccatgtggttgtttacagctatttatctagtaaaccaataacttacagctttttaaaggcttaatgaatagcatggaattattcatgatatctgtgccatatcttgaggacccactgtatacctgatattgcactggactttggaaatgaaaaataatgagtgatcttggggaatttacaatgtaacatagaaaggtgtgtatcactaaatttgcacaatgaaacataattaataatagaagaagtatattatctggcagaatagagtggggaaaagtaccagcaaagacttagaataccagctctcctcaatacttgcacttagacttggatgagaaacagttccccgcacaggcagatgacagggttaggtatgataggagccacgtaagtaggagccactcgaaatctgagtttggtgtggctggtgtggagggttgagggaatatgaagagaggaccacaacttgaatcactgagggcccttttttgatcctattagtgaaatctttaaagaaattgtattggtgacaataacagagaaataagggctttgaggatgaaaacataggctttaaaaaaaaaacttaagaaaaaaataataaagtaagttcagtattcagtgtcctgccttaaagaaagcattttaggcatgcaaatatcccatatattcagaggcttctataaaaaatacaaacaaaccctgtcatatacacatgaggcaaaaaaagatactttgtgagtagaaactattgaggtaaaagaaaaacttgttttagaagctgaaggcccagctgctgacttaataaaacaaattatgagaattttgtttatgcgaaaatccatgctgttgaaaacgcgagtgtttaaagttttctataaacaggaacaaggtgttctaccaaaaaaaagtataaaagcacattgaataactgctttgagtatttgacttggaggaaactaccatcactagttgagtatacctctttgatagcaatatgtgttaaaagtctaacagtctcactctacccctccccgagaaggtaaaggaatatcctgaccttaagggttgtgagacctagatgtttcttaccaaagaactccggtgacttttctttgcagattttaaatagcaaactattttatggtggctttaagccttccagagcaagcagattaggtatgtagttccttttaataaaagtatttggaagttcaataaaggcaattatgatttttctaggaccttttccaattctgtgattatgtgaatgactacccggaatttccatcaaacactgatatacaacttgctatggctacaatttattttggtgtgaaaacatgtttgcttttctgttcttatgtctcccttcatacaaaagtataatatcccagatatgtaggcatatagttctgccattcagagtaattctaatatactttaatcttattaactatctggaagactaatgcacagttatagctgcatttctttaagcaagtctatcatatctttgggtttatgccaaactaaatttgtgaactattatccatttacaaaatgattatttacatcaatcttcctttaaataacaaatgctcacaatgcattttaaaatattacctactttataaaaatccattctgaataaaaatgggagaatacctgtagtgttcattgcattgagttgttgactctttggccaatatgcgtttatattttgtcttgaaagatggaccctatattgacaacatcagttccagtgtactcattgaaagtggataaggaatatgaagtgcgtgtgagatccaaacaacgaaactctggaaattatggcgagttcagtgaggtgctctatgtaacacttcctcagatgagccaatttacatgtgaagaaggtaaaagaaataaaagattaaaatagtagctaacctggcttttgtcaatataacagttgattcacccctgcactggtagtgtgttgtccaaatcaaaatatattaacatcagatatcaggatgagagaccttgagctcactatctgtaacagatattgttcattgcaaaagcagaaggaagatttagtttccaaatttttcattcaggagaagtccggggggcaggtggaagtttagagacaggaatttggtggcaatctccggatggtagaattcagatgattcttttctttatatatttttatatttctgaaattttctatagtaagtttgttttgaatttataatcaggaaaaaaagctgtactgatggttagggaagaaagtatgtatctatatggatggatagatatgtgacatctaagaggaaacccaatattgagtcagcataggtagtcaacagcaggtgcatacggttttagaaagcggaggtgtggcttttacctagaggaatgcctaataagtagtgtggcagtcatacttaaaggagacgtggaacatttgaaaaccctatgtaggagaatcacaacaatgattaaagtttttaaaaatgggacctatgaatttagaataaaagaattaaaacttttagatacagaaataaagaaaactgattaatgatgagcagaaagtatagagtattattattctcaaatgggaaatggctctattccatcttcattgaaaacagaagtttacagggctatatgtttgttaatgaaacaaccacaagctacatagaaaataaatttatatttctgtatttactatacaggtagaatctcatgatactaaatagcattaggatgaaaatttctatagcaccattttctctatactctagttaactgaattcttgtttccaaactatttgatattatgcaattctggccttaaaagtacaatagctatacacccttaagcttagtgtagtggcatttaattcacttaacatatattttttaaactgccttttccttctgttactaacaaaaaagaagctctaactttatgttattttcctgaatatgtcattgatatgaaattatagacactacaagacaaaaaatgattttttctcccccaccaattctttaaaatgcttataatatctccctaggggattttaataactttttaaataagaaaagactatttcagcataaagacctacattttaaatggcaatgttaaggtaaatttcatctgtcatttttataaaaaagtggttagcctctgcctctgtggtaagaatactgggtaccaactgcaaagtagctggcaggtactcaatcttaaggaatgaaatagaagttttacaaacaggttcccccaagtctcatacaaagtatactaaaacctgaagatgggagcctcagtagtgatctttctgtcaattttatgtatataatatacatgagatatatttattatattttaataatttaatttattgatataaatacgtatatttatagctgtaaaatatatgttatttgtgtctaagaagtttctgtcatgatttatcaataaaaactctgccttcatctttttgataaatcttcaatctggaaactaagaaaatcaccacacttaaaaaaaaatagaaaagaaaccgagtgggcattatttaggtagtgtgttaataagcaacacttttttactgaagctgaaacctttatgatactccctggacacatagtatgcttaaagcagattgtttgttttcataaaacacacattgattttgaactatatgctgtttctttattttgaagtttttttttaatgtgaggagatttgaaaagtggacagagatgttcataaaacagaaaaaaactaagtcgttgcattctgtttcagtggttatcaagagaaatcactgactttattagatgaatacaaattatgaattttttgtgaaaagggaaagggaaatgtaaactgtgcttcaactattcgtaattctgaaagcgaaatattcttgtgtgtttcagatttctactttccatggctcttaattattatctttggaatatttgggctaacagtgatgctatttgtattcttattttctaaacagcaaaggtaggtgtggagtagtattctttggtattttgtaccagttgtttagatttccatatgtgtttctatttgttatttgatattttctttgtcaaattatgagtggaaattttagttaacctagtacacttttatctccagttatatatttaccattcatataaaactcaatttgttgtatttatcttagacaatttagaggtttagattctatctggagacttgtacaggacattaagaggcttaggctggtgactatgcataccttgtgatatgtacctctttatccaagagctagctctttccctcaagtcctcaacaagttgacccattcattccaggacttcaaagtatcactgagcctttggctgagtctgatacagtccttatatacagacaatttttttttttccttgagacggagtcttactctgttgcccaggctggagtgcaatggcgcaatcttggctcactgcaaccgccgccccccaggttcaagcaattctcctgcctcagcctccagagtagctgggattacaggcatgcgccaccaagcccagctaattttgtatttttagatacagtttcaccatgttggtcagactggtctcgaactcctgacctcaggtgatctgcccacctcagcctcccaaagcgctgggattacaggcgtgagctaccgcgcctggccccatttaaggtatttttaaagtcccaatggttaatcttgttgcttctcctagaattaaggtgactaacactcccaggttgcctagaactctcctggtttttagcaatgcaagtccggtgtgccaggaaatccctcagttccaggtaaccaagacagttgatccccttacctagaattgaaaatacgttctccagctgaagccaagaggcatctataaatcaaaatgagatctatgttaatatattttaaaagattttactttgttttgtaaggtagtatagcacttgtaaacttcaaaacagaattttgttaggaagaagaattattgggacgctagatttctatagtgtcaagcatgctaaaagtctaactgaatgcagaaagggttattttcagtagagcttcatgtccaattttataatataaaccaattggaaagtaaaattcattctgaattccattttgcacctaactttctggcaacattcctgttttccaaaaaagcagctatcataaatcacaacacaattttctattgtttcaggaaaataaataaatatatttttagaattttaatttgtgtatttaagtaatgccaacaacaaaaaagccaaattattctgttgattaatttcagtttattaatctatatatttggtgggaaaatttatacataacttcagtagataaactcacgaggtatgtaaagtaattagctcttagtattagctgtgaatttctagccattgtgaaggccaagtcaatttgttatgttgtttagttatattagttaacaatattaggaagaaaaaattatcctctcaaaaagtaggatttccaagaaaacatattacttctaatacagtgctttttataaataatgaaatgcttaactataatgtttagtcaaaatcaccaaattctacaattgatttgaaatctttattgttctcccaaatttcctgcactaaattgaattttctgtaggaaagaattaactttattttttatttgcccattaaaaacgcttatcattgtctaaatttgcatgttctactgaaagtgggaaatagtagcaaatatttgtcagcaagtatggacagaacatgtagttccaacaattaaattgatactgcaaagaacgagatttttcctagaactgtagggctgtaaagtggcgtcaggtcctacatgcctttgaaattttctgagtccacaattcattatccaacccacttcaccctgctttaatccagttaattgagtcaactctagcaaaatttataattttatttgtatctgatacaaaaccacaaacatagtttcaagtcaggctattattatactggttcctaccacacaaccctcccagcctttgagctgttaccaattgaggaaagaaataactgaatcagcctaaaatagaatttccaaaccagtagcgaaattcagcctacagattcatattttgttattttattttaattagttttgatttcagagtgaagattttcctacaaagtgtttgtaaaatagagaattttcacacaaaaatccagatttggggattatcttttaaaaaatgaaagatgtagtgaaactaaacaaggcagcatatgctgcagcagacaaccagctatcctatttgggattggctcacattctttaatttgccaccatcctcattcctcctaatgactttgcaactggcttgctttattcctctgcatgacctgcttgggcctcttagatttatgctctgccactgtggcataaggtcactacaaccactagaaaaccactagcgcatgcctgaatgcatcatcctatttaaaaaggaaaagcacacgtcacaaagtcaaacatcagccatttggaaacctttgcttcctgtaattagaattatgttccatctttttatgtttttgggaatttgaaataccaatttcgagatgcagaatcaaaaaaaaaaaaacaaaacagcgaaacagcagcatgacacaaagaacctgggttttgatttggagtcaggttctctgggtttgagccccaactgtgccaactatgaatgcatgatttgaacatgttgcttaattttccaagtttttgcacagatatatcatctgcctccctgggagtcataaggattaagtgaaatgtttagtgcaggggtcacaaacttatttcatagagttagagtacatttttaggcttttcaagccatacagtctctatcacagctactcaactctgccactgtagcacgaaagtggccataaacaaaatggaaatgaatgaagatgcttgtgttctcataaaattttatctacacaaacatgtgacaggccagatttggcccacagaccttaatttagtgacccatagtttagtgcaaagtatatcccacagtgtctgatttatcagaagcactaaaaaatgatagtagttattattaataatttgtattacttatttctatatctgtaattcatcagtaacaatatgctttaacatttgccccactgagtagtagaggctacttaatgcaatttataaaatggatttttgcttattacttggattaggtaaaatagcaagtggaaatactgagaaaatgtactccttatggaatggactggactgaccattcacactgagtggaatagtaactgatatccaaaaatctggttaccacctcttcatgacagtgtcatctctgaatagtcaggagttttttaaaaaattaaatgaattgtttggaataatctctgagcctttttccagtgctataatttgattttaaaaaataaactccaggccagatacaatggcttatagcatataaatccagcactttgggaggatggggcgggagtattgccctgaggccaggagttccagacagctcgggcaatgactagagcaagactccattacaaaaaatgaaacaacaaaaattagcacaccctgtagtcctagctacttaggaggctgaggcaagaatatcgcttggcccaggagtttgaggctgcagtgaattatgattgcaccactggactccagtgtgggcaatgaagtaagaccctgtctcaaaaagttttaaaaaaaattaaaaacaccataaattccaattacactattaattgtacaaaatagatacatgatttattcatttttatgaccaaaaaataatttaaagatttggaacaaaaaatgtaagtgcatcctagaattgtatatataaacccatactgattagttagagatagttaaaatttaatctgtcccatctgaaatgaaccctgtagtaaaaccctggttaataagatcatcttagataatttcataattaatatgaactatatggctaacctacccaagtctaccctttttcaagggtgtaagtaatcttggctccatgtggattgactcttttttctttctttcctgtacaaattactgatgagatgtacactagaattgccttatagctgaaatggaaatcagctttagatgaaattaaatttctttctttcaaatactaaatctggctgaaaataaaaagcattaagaaaaaaacaattgtgggaaaaccacattttcttttaatagacttcagatgaggctttttgggttttttagttgttcttttttttccttctacagtttttctttctcatttactgtctaatattttcttctgtttctcacactccaattatataaagtaccagaatatttggaaaaagtaatagtattgccaatattttatttctatcttttgctataattgagaatatgtagcttttaagatgtcaaaaccaaaattttatatgttttcaaggattaaaatgctgattctgcccccagttccagttccaaagattaaaggaatcgatccagatctcctcaaggtaactaataattttatctaaattgtagctagtactaattaacacctgaagactcctgtcatatgttgaaggttttctgtaagctatatatatcacattcaattttcttgtgtctcttctcctggagaaaatttttttaaatattctatttcttaaaaataagaaaacgtcatatgtatttaaaaagttacacactaatttatgtttttttatatgttttgttactgttgttcttattgtaaccataattaatctctgaacattatttgctaattcatttaattattatgagtttcttttcatagatcttcattttctttctattttctaggaaggaaaattagaggaggtgaacacaatcttagccattcatgatagctataaacccgaattccacagtgatgactcttgggttgaatttattgagctagatattgatgagccagatgaaaagactgaggaatcagacacagacagacttctaagcagtgaccatgagaaatcacatagtaacctaggggtgaaggatggcgactctggacgtaccagctgttgtgaacctgacattctggagactgatttcaatgccaatgacatacatgagggtacctcagaggttgctcagccacagaggttaaaaggggaagcagatctcttatgccttgaccagaagaatcaaaataactcaccttatcatgatgcttgccctgctactcagcagcccagtgttatccaagcagagaaaaacaaaccacaaccacttcctactgaaggagctgagtcaactcaccaagctgcccatattcagctaagcaatccaagttcactgtcaaacatcgacttttatgcccaggtgagcgacattacaccagcaggtagtgtggtcctttccccgggccaaaagaataaggcagggatgtcccaatgtgacatgcacccggaaatggtctcactctgccaagaaaacttccttatggacaatgcctacttctgtgaggcagatgccaaaaagtgcatccctgtggctcctcacatcaaggttgaatcacacatacagccaagcttaaaccaagaggacatttacatcaccacagaaagccttaccactgctgctgggaggcctgggacaggagaacatgttccaggttctgagatgcctgtcccagactatacctccattcatatagtacagtccccacagggcctcatactcaatgcgactgccttgcccttgcctgacaaagagtttctctcatcatgtggctatgtgagcacagaccaactgaacaaaatcatgccttagcctttctttggtttcccaagagctacgtatttaatagcaaagaattgactggggcaataacgtttaagccaaaacaatgtttaaaccttttttgggggagtgacaggatggggtatggattctaaaatgccttttcccaaaatgttgaaatatgatgttaaaaaaataagaagaatgcttaatcagatagatattcctattgtgcaatgtaaatattttaaagaattgtgtcagactgtttagtagcagtgattgtcttaatattgtgggtgttaatttttgatactaagcattgaatggctatgtttttaatgtatagtaaatcacgctttttgaaaaagcgaaaaaatcaggtggcttttgcggttcaggaaaattgaatgcaaaccatagcacaggctaattttttgttgtttcttaaataagaaacttttttatttaaaaaactaaaaactagaggtgagaaatttaaactataagcaagaaggcaaaaatagtttggatatgtaaaacatttattttgacataaagttgataaagattttttaataatttagacttcaagcatggctattttatattacactacacactgtgtactgcagttggtatgacccctctaaggagtgtagcaactacagtctaaagctggtttaatgttttggccaatgcacctaaagaaaaacaaactcgttttttacaaagcccttttatacctccccagactccttcaacaattctaaaatgattgtagtaatctgcattattggaatataattgttttatctgaatttttaaacaagtatttgttaatttagaaaactttaaagcgtttgcacagatcaacttaccaggcaccaaaagaagtaaaagcaaaaaagaaaacctttcttcaccaaatcttggttgatgccaaaaaaaaatacatgctaagagaagtagaaatcatagctggttcacactgaccaagatacttaagtgctgcaattgcacgcggagtgagttttttagtgcgtgcagatggtgagagataagatctatagcctctgcagcggaatctgttcacacccaacttggttttgctacataattatccaggaagggaataaggtacaagaagcattttgtaagttgaagcaaatcgaatgaaattaactgggtaatgaaacaaagagttcaagaaataagtttttgtttcacagcctataaccagacacatactcatttttcatgataatgaacagaacatagacagaagaaacaaggttttcagtccccacagataactgaaaattatttaaaccgctaaaagaaactttctttctcactaaatcttttataggatttatttaaaatagcaaaagaagaagtttcatcattttttacttcctctctgagtggactggcctcaaagcaagcattcagaagaaaaagaagcaacctcagtaatttagaaatcattttgcaatcccttaatatcctaaacatcattcatttttgttgttgttgttgttgttgagacagagtctcgctctgtcgccaggctagagtgcggtggcgcgatcttgactcactgcaatctccacctcccacaggttcaggcgattcccgtgcctcagcctcctgagtagctgggactacaggcacgcaccaccatgccaggctaatttttttgtattttagcagagacggggtttcaccatgttggccaggatggtctcgatctcctgacctcgtgatccacccgactcggcctcccaaagtgctgggattacaggtgtaagccaccgtgcccagccctaaacatcattcttgagagcattgggatatctcctgaaaaggtttatgaaaaagaagaatctcatctcagtgaagaatacttctcattttttaaaaaagcttaaaactttgaagttagctttaacttaaatagtatttcccatttatcgcagaccttttttaggaagcaagcttaatggctgataattttaaattctctctcttgcaggaaggactatgaaaagctagaattgagtgtttaaagttcaacatgttatttgtaatagatgtttgatagattttctgctactttgctgctatggttttctccaagagctacataatttagtttcatataaagtatcatcagtgtagaacctaattcaattcaaagctgtgtgtttggaagactatcttactatttcacaacagcctgacaacatttctatagccaaaaatagctaaatacctcaatcagtctcagaatgtcattttggtactttggtggccacataagccattattcactagtatgactagttgtgtctggcagtttatatttaactctctttatgtctgtggattttttccttcaaagtttaataaatttattttcttggattcctgatagtgtgcttctgttatcaaacaccaacataaaaatgatctaaacca

SEQ ID NO: 18 - DNA, 10123 bp, Homo sapiens
  source 1..10123: mol_type = genomic DNA; note = GLA_gene
atgctgtccggtcaccgtgacaatgcagctgaggaacccagaactacatctgggctgcgcgcttgcgcttcgcttcctggccctcgtttcctgggacatccctggggctagagcactggacaatggattggcaaggacgcctaccatgggctggctgcactgggagcgcttcatgtgcaaccttgactgccaggaagagccagattcctgcatcaggtatcagatattgggtactcccttccctttgcttttccatgtgtttgggtgtgtttggggaactggagagtctcaacgggaacagttgagcccgagggagagctcccccacccgactctgctgctgcttttttatccccagcaaactgtcccgaatcaggactagccctaaactttctctgtgtgacctttcctgggatgggagtccggccagcggcccctgtttctttctctctctctctctctctcgttctccttctctttctctttctcttctttcctctctctttctctctctccctgcccggttctcttttttcactgctccttgcagagcagggccaccccataggcagtgtgcccaaagtagccctgcccggttctattcagacccttcttgtgaacttctgctcttcctctgccgggtgctaaccgttagaacatctagggtgggtaggaggaatggggaactaagattcgtgccattttttctccttttggggtcgtggatttctcggcagtatctcgagggagttagagagaccataaggtcgctgagatctctcccacctcgcccatgagcgtggcatcaggctggaaggttgacatggaggaactttatacatttacacctttgcgtgagggttgaggctggattagataggtattgaacatatctgaccctcacaatccttatctgtaaattgggattacaaccttttaatttcagggagctgacaaaaaaaatctgaaaaatagttcttatctcacacaggtgagttttcaaggagataacctatttaaagtacatagcacagcgcttgaccattcaactgcgcttacagagcaaatgttcaatgggaaaatgaatgtaaatctacaaatctgaatgaatatgtgtatttttctggagagaggatatttacctttcttcaaattctcaaagggctctgtgatttaaaaaaggttaggaatcactgatagatgttggtaaaaggtggcagtcacagtacatttctgtgtccataagttattcctatgaatatctttatagataaagtcaggatgttggtcagacatcacagaagaaattggccttgtaagtttcatgtgaccctgtggtacagtatgtgtggcaattttgcccatcacggatttttttttattggtatttgcatctgattataaaactaatgcatgatcattgcaaaaaatgtagataaagaagagcaaaatgaaaataaagatttccccccaccgttccaccacccagaaataatcatggtttaaatgttaatatacaaccttacaattgttttctatataaatgaaaacatagatttctttatttcattattttccataaaaaatggatcatgtttatgtcatgtttggctaatggcaagaccctggcacccagtctgggctcaaattctgcctcattgttacttagccctgtgacattgggtaaattacactttttttttttttttttttttgagacggggtctcgctctgtcgcccaggctggagtgcagtggcacgatctcggctcactgcaagctccgcctcctgggttcacgccattcttctgcctcagcctcccgagtagctgggactacaggcgcctgccaccacgcctggctctttttttttttttttttttttttagtacagacggggtttcaccatgttagccagggtggtctcaatctcctgacctcgtgattcgcccgcctcagcctcccaaagtgctggtgtgagccaccgtgcccagccttacttttttttttgagagggggtctcactctgtcacccaggttggagtgcagtggcgcgatctctgctcagtgcaaactccacctcccgggtttaagcagttctcctgtcgtagtctcctgagtagctgggattacaggcacaccaccacggccagctaatttttgtattttcagtagagacgggtttcaccatgttgcccaagctggtctcgaactcctggcctcaagtgatctgcccgccttggcctcccagagtgctgggattacaggtgtgagccaccgcacccggcctcttttttcttttttagtctatcataccttgcaaatacagtggttcttcctatgtgttggttttgatatttatgtaatcaaacacatcagtttttcctttctgatttctgactttggggtcatgctgagaaagtcctttcctacctgaagataatacagtatatacgtttcttactagtatttttgtggatttttaaaatatttaaatctttagtccatctgaactttgttcttctatcagaaatgccacatttaataaataataagtcccatggtatcagatggctggaaggacctctttcgaaactttgtttaattccattaatctgtgtattcttattctaatgctaatagttccacactagcttcctttatcttttttttctttttttttttttttttgagctggagtttcgctcttgttgcccaggctggagtacaatgtcacgatctcggttcaccgcaacctccgcctcccaggttcaagcaattctcctgcctcatcctcgcgagtagctggaattacaggcatgcgccaccacgcctagctattttgtatttttagtagagatggggtttctccatgttggtcaggctggtctcaaactcccagcctcaggtgatctgcctgcctcggcctcccaaaatgctgttattacaggcgtgagccaccacgcccagccttcatcttttaatgaatgtacatgtatgtaatcttttaggtgaactttttgtaatgttgtgccaagttccttaaaaagcccttttggaagctgggcaggtggcccacgcctgtaatcccagcattttgggagtctgaggcaggtggatcacttgaggccaggagttcaagactagcctagccaaaatgcaaaaccctgtctctactaaagatacaaaaattagccggatgcgatggcacatgcctgtaatctcagctactcgggaggctgaggtagaagaatcgcttgaaccggggaggcagaggttgcagtgagccaagatggcgccactgcactccagcctgggtgacagagggagactccatctcaaaaaaaaaaaaaaaaaaaaagataaaaaggaaacctaagtactcttgggctttgttaaggattttgttaaatatacaaaggattgcagggaaaattaacttatttttaatattgagtatgcttatccaagagcaaaataatatttctccatttattcaaatcatttaggagcatcatagttttaacatatgggccttgcacgtatcttaaatttatctctaggcattttaggttgttcagttgttcttgtgaatgggatctttttctccaaataggattattgttgatatctgttgattatgttaactttgtagtttctgactttactgaactgtcttcttagatctaatactcttttcaatttcatcatatatttctcattcctattttgtttggggtttttagggcgggaatattaacgggataagagagacaaaagaaaatctggaaaaacaattcattttaccttacattgcttgtgattactaccacactattactgggttggaaaaaattgtgaaatcccaaggtgcctaataaatgggaggtacctaagtgttcatttaatgaattgtaatgattattggaatttctctttcagtgagaagctcttcatggagatggcagagctcatggtctcagaaggctggaaggatgcaggttatgagtacctctgcattgatgactgttggatggctccccaaagagattcagaaggcagacttcaggcagaccctcagcgctttcctcatgggattcgccagctagctaattatgtgagtttatagataatgttcttgttcattcagaggactgtaagcacttctgtacagaagcttgtttagaaacagccctcatggccgggcgtggtggctcacgcctgtaatcccaacactttgggaggccgaggcgggtggatcacctgaggtcaagagttcaagaccagcctggccaacatggtgaaaccccaactctattaaaagtacaaaaaattagctgggcatggtggtgaacgcctgtaaccccagctacttgggaggctgaggcaggagaatcgcttgaacccaggaggtggaagtttcagtgagctgagatcacgccattgcactctagcctgggcaacaaaagagaaactccatctcaaaaaaaaaaacaaggaaaaaaagaaacagccctcatgacacttagaaagtagaatagctggctgttatctgaacattgaattgtaaggcttatcaggtggactttgcattccatcagcagacaatttttttttttttttttttttgagatggagtctcattctgtctcccaggctggagggcagtggtgcgatctcggctcactgcaagctccacctcctgggttcatgccattctcctgcctcagcctcccaagtagctgggaccacaggcacccgccaccatgcccagttaattttttgtatttttagtagagacggggtttcaccatgttagccaagatggtctcgatctcctgacctcgtgatccgcccacctcggcctcccaaagtgctgggattacaggcatgagccaccgcgcctagcctacaaatgttttgtaatagctcttgaggcccatcttggagttctccttttgctaaaaccactgaactctctaggaggaaaaaggaacttggttcttgacatatgtgtgcatgtatttccatataacctttaggaagctattgcaatggtactataaactagaattttagaagatagaaggaaaatattctggagatcattgaagagaaatggagtccaacactagttaaagatgatgaagacagatttttttttttgacggagtctcgctctgtcgcccaggctggagtgcagtggcacaatctcagctcactgcaaccctccacctcttgggttcaagtgattctcctgcctcagcctcccaagtagctgggactacaggcgcacaccaccacgcccggctaatttttgtatttttagtagagacaaggtttcaccatattcgccaggctggtctcgaactcctgaccttgtaatccgcccaccttggcctcccaaagtgctgggattacaggcatgagccaccacgcccggccgatgaagacagattttattcagtactaccacagtagaggaaagagccaagttcaattccaaatacaacaaagacaggtggagatttatagccaatgagcagattgagggggtcagtggatggaatatttaagaagacatcaagggtagggagcttcttgctaaagcttcatgtacttaaacaagaagggtgggggatgagggaaattgatcagatatcaatggtggcagtattgacttagcaggattcttgctaagaggtcttgctaggacagacataggaagccaaggtggaggtctagtcgaaaagaaggctcatcagagaagtctaactaaagtttggtcaagaagagtctttgtcaaggtaaatctatcatttccctcaaaaggtaattttcaggatcccatcaggaagattagcatggctgctagctttctcctcagttctgggctatagctcacatgcctagtttgaactagctcagcagaactgggggatttattctttgtcttccaacaaactcatctggatgattttgggggtttgtggggaaaagcccccaatacctggtgaagtaaccttgtctcttcccccagcctggaatggttctctctttctgctacctcacgattgtgcttctacaatggtgactcttttcctccctctcatttcaggttcacagcaaaggactgaagctagggatttatgcagatgttggaaataaaacctgcgcaggcttccctgggagttttggatactacgacattgatgcccagacctttgctgactggggagtagatctgctaaaatttgatggttgttactgtgacagtttggaaaatttggcagatggtaatgtttcattccagagatttagccacaaaggaaagaactttgaggccatggtagctgagccaaagaaccaatcttcagaattttaaataccctgtcacaatactggaaataattattctccatgtgccagagctcccatctcttctctttcagttcattaattaattaattaattcatgtaaaatccatgcatacctaaccatagctaatattgtgcacttataattcaagagggctctaagagttaattagtaattgtaactctctataacatcatttaggggagtccaggttgtcaatcggtcacagagaaagaagcatcttcattcctgcctttcctcaatatacacaccatctctgcactacttcctcagaacaatcccagcagtctgggaggtactttacacaatttaagcacagagcaactgcctgtccctgctgctagtttaaacatgaaccttccaggtagcctcttcttaaaatatacagccccagctgggcatgatggctcatgcctgtaatcctagcactttgggaggctgaggcgggtggattacttgaggtcaggagttcgagaccaccctggccaacatggtgaaaccccatctctagtaaaaatacaaaaattagctgactttggtggcacatgcctgtaatcccagctacttgggaagctgagacagaagagtcacttgaacctgggaaacagaggttgcagtgagccaagatcgcaccactgcactccaccctggatgacagactgaaccccatctcaaaaaattaaaataaaataaaataaaataactatatatatagccccagctggaaattcatttctttcccttattttacccattgttttctcatacaggttataagcacatgtccttggccctgaataggactggcagaagcattgtgtactcctgtgagtggcctctttatatgtggccctttcaaaaggtgagatagtgagcccagaatccaatagaactgtactgatagatagaacttgacaacaaaggaaaccaaggtctccttcaaagtccaacgttacttactatcatcctaccatctctcccaggttccaaccacttctcaccatccccactgctgtaattatagcctaagctaccatcacctggaaagtcatccttgtgtcttcccctttatttcaccattcatgtcctgtctatcaacagtccttccaccagtatctctaaaatatctcctgaatcagcccacttccttccatcttcactacatgcaccctggccttccaagctactatcggctctcaaccagactgctgggaccacctgatctctctgcttccactctgtctcaacccccatctattttccaagcagcactagagttatcatattaaaatgtaaatatcagttttttttttaaagaaaaaaaccctgagacttaacagagttataaaaaatataaatgtcatcatcagttccctgcttaaaacccttaactcgcttccaattgcacttggaatgaaaccaaactgcactgatccagcccttgcctgcctccccaaagtccaaggggtcatggctctttccctggctacactggttttctttctgtccctcaacactgcaagcctattgctgccccagggcctttacacttgctttttttctgcctagaacagttcttccccaaagatttttaaagggccgggctccttaacattgaagtcgcagaccaaacgccacatatgcagacagttcttctctaactactttaaaatagccctctgtccattcattcttcatcacattaacctgtttaattttcttctcagagctccacactatttggaagtatttgttgacttgttaccatgtctccccactagagtgtaagtttcatgagggcagggaccttgtctgactttgactgtatctctcgcatatggttaagtgttgaatagttatttatggaatgaatccctattattccctcattatctctgcaaaatagtcttttttctcaacatcttaaacctgatatcccacctgcctatctacaaactttttttttgcgacagagtctcactgtcacccaggctagagtgcagtggcgccatctcggctcactgcaacctccgcctcccgggtttaagcgattctcttgcctcagcctcccagtagctgggattataggcgtgcgctaccacatctggctaatttttgtatttttagtagagatggtttcaccatgttggccaggcttgtctcgaactcctgacctcagatgatccacctgcctcggcctcccaaagtgctgggattacaggcatgagccaccgtgcccagcctctacaaactttttattccattaacaaactatatgcctgggatttaagttttcttaatacttgatggagtcctatgtaattttgcagcttttaattttactaagaccattttagttctgattatagaagtaaattaactttaagggatttcaagttatatggcctacttctgaagcaaacttcttacagtgaaaattcattataagggtttagacctccttatggagacgttcaatctgtaaactcaagagaaggctacaagtgcctcctttaaactgttttcatctcacaaggatgttagtagaaagtaaacagaagagtcatatctgttttcacagcccaattatacagaaatccgacagtactgcaatcactggcgaaattttgctgacattgatgattcctggaaaagtataaagagtatcttggactggacatcttttaaccaggagagaattgttgatgttgctggaccagggggttggaatgacccagatatggtaaaaacttgagccctccttgttcaagaccctgcggtaggcttgtttcctattttgacattcaaggtaaatacaggtaaagttcctgggaggaggctttatgtgagagtacttagagcaggatgctgtggaaagtggtttctccatatgggtcatctaggtaactttaagaatgtttcctcctctcttgtttgaattatttcattctttttctcagttagtgattggcaactttggcctcagctggaatcagcaagtaactcagatggccctctgggctatcatggctgctcctttattcatgtctaatgacctccgacacatcagccctcaagccaaagctctccttcaggataaggacgtaattgccatcaatcaggaccccttgggcaagcaagggtaccagcttagacaggtaaataagagtatatattttaagatggctttatatacccaataccaactttgtcttgggcctaaatctatttttttcccttgctcttgatgttactatcagtaataaagcttcttgctagaaacattactttatttccaaaataatgctacaggatcattttaatttttcctacaagtgcttgatagttctgacattaagaatgaatgccaaactaacagggccacttatcactagttgctaagcaaccacactttcttggtttttcagggagacaactttgaagtgtgggaacgacctctctcaggcttagcctgggctgtagctatgataaaccggcaggagattggtggacctcgctcttataccatcgcagttgcttccctgggtaaaggagtggcctgtaatcctgcctgcttcatcacacagctcctccctgtgaaaaggaagctagggttctatgaatggacttcaaggttaagaagtcacataaatcccacaggcactgttttgcttcagctagaaaatacaatgcagatgtcattaaaagacttactttaaaatgtt

SEQ ID NO: 19 - DNA, 45283 bp, Homo sapiens
  source 1..45283: mol_type = genomic DNA; note = HADH_gene
cttccctgcccgggtctcctcgctgtcgccgccgctgccacaccatggccttcgtcaccaggcagttcatgcgttccgtgtcctcctcgtccaccgcctcggcctcggccaagaagataatcgtcaagcacgtgacggtcatcggcggcgggctgatgggcgccggcattgcccaggtgagcggccctccctgcagcgtgcccacgcgcttggccgcccaccctgaggtggaagctctggcgcgaccggccgcgaggggcctgcacccgcccgacaccagggagttttcaccccgcgcctcccgggtgtagttgaaatatctcgcgtctgggcctgtgagggcccaagtctcactcccctcaaaattcagggttctgggccgatcctcagcttcctcgtttggaaaattctggctgcccccagggcccgctgaaggttccatggagagtggcggtgaatgcattttggaagcgggccgtgcaagagaagaaagaattgtatgtgcacaaggttcaggcataacgcgtttgttcctgctcggctcaaacgggagtttgctgccaaagacatgaactgcgatcagttttaattctatcagttatttttgatttttattctgtaattgtgcagtctttgtcaaagtagttttctctcctaaacggcctcccggctctccccggtctttccttcgcttgctaggttgtaaagaatagtagtagtcatgacttttgtagcactttgtaaagtcacctaatggaagattgctgaggtcctggttttgacctttgaaatagtgccgtctgtgcagagttctgagcttgcgattttggcgctgcagcggaataagtctctctctttttttttttttttttttttttgagtcggagtctctttgacccaggctggagtggagtgcaatggcgcgatctcggttcactgcaacctccgcctcccgggttcaagcgattctcctgcctcagcctcccgagtagctgggattacaggcgccccgcccggctaattttatatttttagtagagacagggtttcaccttgtgggtcaggctgatctcgaactcctgaccaaaggtgatccgcccgcctggcctcccgaagtgctgggattacaggcgttagccactgcacccagccggaacaagtcttttatccattgtacatcttcagggcttttccattgttctgctgagctgtggttcaggctcagttgtgcgagtgattgattacctggctactgtaatgcttgtactttttttttttaaaaattattccatttcagctcacattggagaaccatggttttcgtatcctagctgattatattcttagcatttcagtcctttgcaacttggtttgttggggaaggcggttatagtcatctaatttttcttggggacagtactactgtggctacagtcatgagagagtttactttttcaatgtcttgtttccaaccaagtccacgctttcatgcttgctttttaaaaacaaaaacaaaaaaaccttttactattaggtattatatatctcaattttcttctccttggcaagttttttacaacgtttttatttgattgcattttcttctaaaagctatatccctgtaatgttttatttatatgacttcttacagtctcccatttcctctgagaccataattttggacatacattgccctttttattgtgtggatcccctggctgctaggttatagtatccccataatctatgttgtatgtggactgggaggagtaactccctttaacctaaaagttccacaggttatactcaagagaaagtttagtttgagtacgtttgtattcccaggctccacccaaatctcccaaggctgtgagagtgagatttgttgtgagcaggaatagaacaatgtgttttttagaaacattttaacaacatcttagtaacaaaatattagggccttaagcagcctccaggaacattatgggaaatggatccagaaacttgtggctggtgtccttgaagacagcagtggaaaaagattagaaactaagtagaaagcgtcacttcaacttttgtagaaaatcagagtgcttagttctttgaatgctgcatccatcattggccaaaaatggatgttgtgttgcattaaaaggcagaggggcaatacctaaaattacaggtatggtgttggagctttcacctgacaaaggagtaaggagaaatgattgacattaatggagaacacaggcttgtgcttgtcaatcaaactcttaaataggtggaccagggagtgccttttgaaacttaagggaaaaaaaagctatttatgccataggctggacacataatggaactgtcattctgaaaggttataaagaccagaaatctataaagtggacgaccataagaaacagttccatccttatgtaacacagtttggaaaaacctcagttactttagttgacagctccaatcctctaaaacatttgtgagcaatgctttgcagtggtttagcttatctgcttttgcaccctaccctgtagcatgcagttctaggcagtattgcttcattctttatgctccttgaccaacagcttttggcatagggtaaatctgttttgcttattgagtgccagagacgaattagttgatgtgttttgagtacagatgggctacagttcaatataagaagttggatggtctgcatgctagctctgcctcatgcagtattaacatgggactttacctctgtgtctcggttttctcatctctaaagtagactaatgctagtactggcctcgtagggagagaattgaataaattcaatgaattcatgcatatgtcaagcagttacatatatcaagcatatgtcaagcacttacacagtgtctggcatgtaataagagttcacagaaagttagctgcctttataataattatcttcggcccggcatggtggctcaagcctgtaatcccagcactttgggaggctgaggggggcagatcatctgaggtcaggagttcaagaccagcctggccaatatggtgaaaccctgtctctactaaaaatacaaaaaaattagccagcatggtggcatgtgcctgtggtcccacctacttggaaggctgtggcagaatagtctcttgaacctgagaggtggaggttgcagtgagccgagatcgcaccactgcactgtagcctgggcaacagagcgagactccgtctcaaaaagataaataaaaagaataatcatcatcttcattgcagttgtcctgtccttttgcccttttcccctcatatccactcccatcctgatcacagctgctgaggtaggcctgtaaggtttagatggagaatattggtcatgattccctgtttcatcttgcttaatcttgaatgcatatacccgctgatgctgcagcgggtatgttttttcagggacctctgaaaggagggagaacactttttagttaccccccattttattgttaaactttagtaaagccataaaagtacaatcacaaactagtattgaggttatgttactgattttcattagcttaattttcttgaactttctgacgtggttttaatgttagtcaaggtgcagttctgcttataattttaatagttttgtcattttaaacacgtcagtttgtgctcagaaggatgaaaaaatatttaaatagattttgtgggagcctgatgcatttctcaagcaattaagcaatttaagacaagttcagtgcttaattacatttgatcagagcacaggccatttgtacatgtgtattttccgagagtatctactttgcctgtcatttcttttgtttgttttaaattaaaaaaacaaaaaatcccttagactgcaggttaatatttgaagttaacttgtttcatgtgtttgcttattacacacttctgacttggttttgattgctaatttatcttcactggatacttaggccaataaagaagcttataggattaaatgagccttgagtgggggacaggttgtttttttgctttataaagaggaaaacaagaaaggaagaaagctggtagctgtgtgcatttctccagtattgaatcctttctaggctttgcttcatacattgggttttttcatatgaggagcccagagagaatgcatagctttcattagattacttgtgaggagccagtgggctccctgggaacggggcacttcagatgtcccccttgagacactttacatgctctccgggtgcaaccttctttttagtgcactactcttctttgaggaagtgagaaagtttgcatcttaaagggggttggggataggttcttctctcccaaagcttgctttttttttttcctcctttttaaaaagcagaaagtgcatattttttctagagagagcttctttggctattaaaaacaaagtaagggcagggagagcctgctacgttgcagggattttgtgtgactctaccatgcttgataaggattcaggtagacctgaaagcttctccccagccactggatttgttctctcatctcttcttcttgcccccaaatctgcattttctgatgctgaaaaagagaatgatcagagttgtttcatatttttttagctttattctcttctactgtgagtacagctctgttgagctgtacagtacagtactgctttgcttgcaaagcagtacagatgcctaggagaagtttcaggatcacaggagaccagcagttacctggctgtaagctctccttttgactgttccttatggagggaatatttgtactcccagttgttaccttcctgctgaaggacatgagatgtgtctgtttgttatgaagttttccccctacttcccgagttgttgcttatctttgttgggctgttctctgctcttggttgaggtactgggatgtagaaccaccctctattagcatattagttattggactctgggtgaggttggagatactgtcattcctagagggtagaagaggtagggctcacaggcaacagaaaataatgctatgggatatgtttggacattttttagagcagaaatggcacttcagtcagtcaggttttggcattttcctgccatgttctgcctccagctttaatcacttgccccttgcttgagtttcttctttcttcccctctcccttctctcttatctgtggtaggcacacacacctcactctctagttctcctgggaccacaggaagataatgtggatgttctctgtggctccccctgttatattcatgatgttattatttctggtagtggtattctaatctcaaaagtacaggctatgaggtccctgccagggtttagatgctagccttcctatcctgcctttaggaaccttgggcaaatcacttaactcctctctgcctctttacttacctgggaataatgagactcacctgacagctgtgaaagttaaatgaactaatatacaagctcctagaatagcattagtgtgtttgatagtaactgtctgataaatattagctgctttcacatagacccatcagacctgatctagtgaggatttctcttagattgtcttcactgtcggaagagttttgatatagggagttccagcaattctaaagatgttaagacttatttatgtgggttgttgagaaagatagtgtaccatttactggtttttgtagagctaaaaccactctacaaaatatgacactttattctgttcaaagaattttgatttatttaatttcatgtgaccattacaataatcacccctgcagagatggttcctggggtcaatggtcagaggcagagctggggttagaacttgagttctcttctgttctgctgcctgtaaatccccaagcctgaattcagttctgcctgcacctctggcaagtgctgtattgtggggagaagtgtggcatccatggcaggggatcctctgtggctctctggaatcagtacatcccaggttgacgtctccttggctctggactcaaagttagtctacctgctggtcgtctacatcagggtgctgtgctgccatccttctgcccatggtagactcaaactcacctgccaagatctaattcattatttcccctccagctttttccagagagcttgcccctcctgttgctgcagttgttcttccagccacatgtactctgaagatgggatcacaatcagtgtctccataccagaaaaggctctgtaactttttggtcatgggagagctctttcctctgccctctcctttgcagttcctagaccaggtgtgttaacctgaattgtcatgggagcctcttaattggtcctttcagcaaaaactaaaagaaaaaacccactcatcatggcaaacattgtcatattagtcttcctggagaggcatttggatttataactctcctctacccggaaagtgtccatcatagcaacatcttccagggattcttaaatataacgatgctgttgacatgtctggttatccctttaccttttcagaatttgtgggaggtgagaagtctgggagaggttatctgggttattatgaaacctacacacttactgaattaaaaaaaaactatgtaacacaattctagtctaaaaatgggcgcacactttctttgccttttagaaatactttttgaaatgtaaaattcgaagtctaataaaggagtctgtccaattaatttaactgtttgaagaaaaaaaccagtccaggcatggtggcttacgcctgtaatcccatcactttgggaggctgaggcgagcagatcacttgaagtcaggagttcgagactagcctggccaacaaagttaaaccctgtctctactaaaaatacaaaaattagctgagcatggtgacacatgcctgcagtcccagctattcaggagactgaggtggaagaattgcttgaacccaggaggcggaggatgcagtgagccaagatcacaccactacactgcagcctggccaacagagcaagactccttctcaaaaaaaaaaaaaaaaagaacaaaccagctggttgtggtggtggtggttgacatcctcaacagaacagcttttgctaattgttgaagtcagggaagacaacttgtgctgatggcagagttcaagacattacacaaccagagacaatcataaacccagaaatgccagccctgagagatgcaactgatgtatgacttttttcctctctggatcaaaccatgacaaccgtaaaaggcaggccttgctgttaaggcgctgcagcctctgaagcacagttggcctcagggagctctgactcagtctacttattctggggatctgaagaaagtcagaaatcatgtgtggtagatagtttgcataactttgggattttccagagagaggatgaaaacggtggccctccttgtaatgtctaggcacatgggacatccagtggaactgttgagggaggagatgggagggagaccagtcaccagaccagttgatgtaggtctcatagactcaccactcaagttgtgcttcggagaaagctgcttcaaatcttcttgatacatttacaaagataaataaatccagtgtgcttctgcttggcatgtttacttggtcctgtggtcagagtgctctggggctttgacaaatgtgctagtcacttagcctatttttacaactctgaagcagccgtgtctaaaaatatttcctctctggctgagcctgccttccaccaggcctagaaaagtcatggagctgaggacatagccttcaaatatttttttttccattgcagactgcttgtcctcaaggtcttaccagcatgtaggtcactgtaatataaaacatgagttctcaatggattgatttaaattgtggtcactcaaactgccaggaagagtcctcctcatttgttgtaaaaataacagatgtctatgaaaggagaagaagaaggcctttctttttttgcagttcatttctccactgccttctccatcccagaaagttggcggtaacttgggtgttactgaattactcaggagaatgaattgtacttgtttctctgtagttattttctaaataagaggttacgttatcaggagaggccatcagctacagcagtggaaagagccaccaggtctcatcttgactttaccaacaaatgtctttattcagtcaacattccctgagggccagccacagccaggcagggtctaggttctcagtgtacaaagatgaatgacatttggtcaggagcctacagtagaggagttcagattactataacacagtttggtaggtgctgtggtacacagatgcagggatgttacagggcatatgggggacatctagcttagggctgagaggatcttggggagtaggcttactaactggaaatgattgttttgttttgttttgagacagagtctctctctatcacccaggctagagtgcagaggcgtgatcttggctcactgcagtgtccacctcccaggttcaagcaattcttctgcctcagcctcctgaggagctggcattgcaggcgtgcaccaccatgcctggctaatttttgtatttttagtagagacagggtttcaccatgttggtcaggctggtctctaactcccgacctcatgatctgcccgccttagcctcccaaagtcctgggattgcaagtgtgagctaccgcgcccggctgatttttaggcttagttaataggtgaagttggggagaaggtgaggccaagagaagggctggagttgagaggcagatgtagggagctactggccttgtggtggtgttaagactgtcatgcatgaggcaatagttgtgttctttttgtttttttgtttttttttcttagtaatagccatcctaatgggtatgagatcagaggtttttaacattatactgtgatggacattagagatttcatgaatctccttcatggttcccgaaaggttggtaaagattccttctctgacctttgttgtacatattggtcttcaatatgcattcttatggaaaaaggtgttcatggctaaaacatttgagagccgccacactgaatgatctctgggttgtcttcctcctctcaaaattgatgatcctgattatctgtagctaataagcctgaacaataaatgctttcgccaatctcttaaagtagttgagaagctaggtgtgttagtttcccttctgtgatagagaagaaacctgtgttggagagcagtgagcttatgtgtctgtggccatctctgacctgattcacacatgtgcccctcacagacaggcacagacacagggttggcatgcctctagccttacagcctcttggatgaaaggtataagacacattcacatgttggagtgaattaagcacacatccattttgaaatcacagggctggataccacttaaagaatattgatcttgcattgggcaacgcatagcaactgccctacatttccccttttacctagcgtcacaaccaccagtactagaaagcagttaatctgctcaccaaaataacagagagagactttagtggcattttttccacttggtaattgactagactctggctattagctccttttttttccttactatccttttcaaactaataacgtgacttctcataattttaaagtaacttgatgcttacacaaagtttatcataaaggtttctagcaacaaaaccagtcatgacttcttgagaacttatttctaaaataatttacaaattgagacttatgaaaaaatagctctgtcattcaagtgttcatttcatgagtatgaaatatctcccttgtgctagacatcaggccaggtaaaaagtaagatgtgattgctgctcttgagaaacctactgtctagtggaagaaatacaggtatgaacaactaattgtaatgaaggcacagacagcctacctgtcatatctgggatttgatctgaaacagatgaaagttataatagtttacataccttaccttaaagtatggtttttaaatacttaagatgtgatatgacatatagtgtgtatatatatcttatgctaaggaaaaagggacattaaaaaagcttatgttaaaagatatatgtatacattgtactgcctgtatgtttgtgaaatttgtatttactggaaattctcattggcctgtagataggagtgttcctaagcaccctatattgggatttgtggtaacagcagcttgacaacctgaagtggatgatgcaacagcacttttgaaaggtctctccgtactatcttgatttcatcatctaaagttggtgttggcaaagagaagataagtgtttagggtgttggatatcccagttaccctgatttgatcattacacattttaggcaggtatcaaaatgtcacatgtaccccaaaagtatgtacagctattacatatcagttttttaaagaagaaaaggttggtatggttagcttttctatttcaagtgtatcattcatctttcacatctgggatttctcctatgctctggttggttaataacttttattctgaaatcggtgagattcttatgacatgaaatagtctataaccagttaagtttttatttctctgttctgttcacatcctggggactgggctgccattacataactgagcagccattggtggttcacaccagcgccacacccagttattttctttcagtatttgaattcctgcacaaaagatctgctgtatctgcaaatcactagaggcacaaaagaagtgattacctctactaagggttgggagaagtttcactaaaggagagatggtgtccatgttagattatgaagggtaagttgaagtccatgaagcagcaatgagggagccggacatgtatggcagaggaaaccacatgaacaagggcacagagccatgagatagcacagaggagggagacgtgtggtgtggctggggaagactacagaatcgggttactaccgtccaaagcatttgttatttagcagttattgaccagctatcatattcaaggcatgtgataagtactaagggctacaaagaccaaatcaatttctgccattaagggattttaaatctaagagcagagattagacagagatctaaatgacacagtttactttggtgtaaagtagtacaataagagcagtaaaaatctagttctgaggtttcaaaatagaaagtacattcatttggaaaaaggcttcatggagagggtagcatttgaaatgggcctgaataatggatagaacatttctggacagcagttaatggttgggattaaggaaaaagtgttgtccagaaaatggtgacctacagaatagtggtaccagtaatgaaggccaaggagaattgattttagggtcaaggtgataactgcagcttagatagattattttggtttcaggcacagttggaagtatgagaacgattggaatttcagaaggaaattatattggaaacagaaccttgaaggaagtccttgtttataggcttagaagatcaagagaggtcaattaatatggctaaaaggaacagacagataagaaactgaagagtttcaaaaatgaaacttttattggcaatgtacagagctgttgtagaagatgaagccaaagaacaggcattgactttagcaatttagtagaccattgataagttacagtagtccccccttacgaggggagggagtacattcctagaccctcagtggatgcgtgaaactgcagatagtaccaaatcctatacatactatgtctttttgatctgataacccagtcaactaccaagtgactaatggattgggtagtatacagtgtggatatgctggaccaagggatgagtctcctcccagacaggacaattcaagattgcatcacactactcagaatgacatgcaatttaaaacatgcatcatttatttctataatttcccatttaatatttttggaccatagttgactgttggtaactgaaactacagaaagtaaaaccacagataaaggggggaccaactgtatctaatttcatgcagcagtggtggtggaagaagctactctgataggaatgtttgtgttccctccaaaatttatgtcgaagctgaatccccagtgcagcagtattaagagataaggcctttaggaggtgattaggtcatgagggttctgtattcatgaacagcttagtgccatttaaaggggcttgagagaccaactttgcctcttctcccttctgccatatgaggacacagtgctcgtcccctccagagcaggggtccccaacttctggtccgtggcccattaggaaccgggccacatagaaggatgtgagcagctagcaagacttcatttgtatttacagctgctccccatcacttgcattgctacctgagctctgcctcctgttggatcaagagttgcattagattctcataggagcatgaatcctattgtgaactgtgcatgtgagggatctaggtttcgtgtccttgtgagaatctaatgcctgatgatctgtcactgtctcccattatccccacatggcaccatctagatgcagcagaacaagctcagagctcccactaattctgtattgtggtgagatgtataattatttcattatatattacaatgtaataataatagaaataaagtgcacaatcaatgtaatgcacttgaatcatccctaaaccatcccctcttccctgcaagacggtagaaaaattgtcttccgtgaaattgtctcccatgtcttcctggtgccaaaaaaggttggggacctttgctccagagcatgcagcagcaaggcaccatcttggaagcagagaacagccctcaccagacactgaacatgctgatgatcttgatctctgttgtttatacattacccagtctttggtattttgttatagcagcactaacagactgaaataagccatattactagagtttaggaatttaatggctcaggagaaagtagaagcaccaagtgtagtgaataaaatagcagctaacaagctttgtgcaccttcacatgcctggcactggtctaagcatgttaaacacattaacttctttaatcctcacaacagttttatgaggtgggtacctttgttactaacctttatgacagatcaggaaaccaagacatagaggcttcgtagctcacccaaagtcacacagtgagtgagtggctaaatcagtgtcttagtctttttttttttttttttttgctgctattaacagaatacctgagactgggtaatttataaagaacagaaatttattttctcatagttctggaggctgggaagtccaagatcaaggtaccagctttggtgtctggtgcagacctactcgttgtgtcttgctgggggaagaaggctgtctgcacatggcagaaggtggaagaaagctagacgaactttctccgtcaagtccttttataaaaacctttaatcccattcatgagggaggagccctcatggcctaatctcctcttaaaggccgcacctctcaatactatcatattggcagtgcctgacttttgaagaggacacattcaaatcatagccaggttttaaacccaggaactccaactataggcttgtttctccacatatcaccatgccaccaagtaatttaaagactttggtggtaaagcaaaggccagcctcaggtgattaaggaggatccttttcttcctccctttttatatggagcaggatcccagcccgtttgtaaaaaaatagaaggacacagaagggaaaacttgaaaatgaaaactgaaaaacaagtcatgaaatcagaagatgtgagatcaaaagcaaaataaaatagtttaccttagaaggctgtgcctggatccaacaataggcctcagacccttgcagaaagaagaagggggcagcccagaattaaaaaaaaaaaaaaacaaaaaaaaaacccgcaagctattgtgatgtgccaggcaccactgcaggtttttgacttgtattaacccatttaaccctcccaacaaccctgttgcccctgttttatagatgaggagacagcctgctgaggttaaggaatgttttccatccccaacttggcacacaggctctggagtctggcccttgcctgtctcagtactgtttcaggctgttgccctcagaccccgccatgccttccagggtcaagaaaggcatgtgagcaggcagcttgagctccctgtcacgtgtagacagtgagaataatgtgccttccccaaaggcagttatgaagatcagaggagataatttatgaaaagtgcaagctctcttgagagtaggggattttgtttgttcaccttacaaggcaggtgttgagtcaataggctgcagtcagtgaaggaatgaatgcagtggcatgcgcagcgtggtggtctaagtggtagttttggtccatccctaggggagcacaagtcttgggcagaggatcaaaagcacacacctctgagaagccaagtgtttttgtctgtaacctttgatcattcaaaaggaagcattttctaacctctgcatttttttacccaaactgtacaaaggcttccttgctgtccaagttgtggtatactccagtgcagctgcctggcttccaagagaaacttagcacttcttgttctgtttgtagcctcaaatcaacatgtaaccaaaagctgtgaatgaataatccaaacttgaagaaccccagattttattcaggaggagtaactggaagccataaccatgaacttccatatctgtcataggaaagaggttggcctcagcagcaatgagggataattctttcaagaaaggaatgaagagagaagttagatggaaaagagatttttaaggtcaaaagaagcagctgaagaacatgtgtaggacagccttaggagttactacacttcaagacctgggtgtctgctggaggaaggaacatgaccctgcggagatgttaagggttgggagagctgagcttggaggctggaagcccagctgggaggctattgttaaagaggtaagatgaccctaaactagtattcaggatgttatgtggtactaaaaggaatgttaaacgaagtgataatactgtattcagtttaaatgtttattttatactgtaactcaccatatataccttctttttttctttctttctttattttctgtattggaaactcctaatcaagataccttctttcttaatatttgatcttatggttaccaaaaagattaaatcaagccattgtttttcaaactagggtctttggggatctaaaacttacattaaacaatcttaaaatttgcctttttttggatgatcctagaattaatacaagtgtattctggatgatttgaatgtttcatcactaacgagatctgagatatccatccccttatgtgcatttgtgttcatattattatttgtgccaagtgaagccacagtgtctcctccaaggacattttgccgtaagttgaagaaagaaaaatggtgggagaatggagcaattacaggcacttgataatgttggtgttaggacttcgaatgctaaagaatggggcctcacaatggtcagtacagtatttatgttgtaaatgtgtgtgttgcccggattcattctttggaagaataattagttataggcataatggtaactgtgaatgaattttcctcttccaaatatcaaatacagtcatatgctcatttaatccagattttaatatcataattatcttgtttcgaaagaacaaactgcataactaaagtgatgcttcattaaaattgacatttgaccttggagaactgattaaataaaattaaatgagataggataggcctggtgtctggcatttggaacgcactctgtatgggagctgttattagggctggcaaacctcaatgggctctggtttcagttggttgtggagtctttcacggaatttcttctctaggagattcaagattttctcccagcattgtagcctgtggagaagaaaggaggatcaaagctcaaaggtggtggttagtcagccaggagcaggcaggtgaccatcaaggaatctgtacaggggatggtagatgcaagtgtggccagaggtcaaggctagaaaagtgctattgcagagaaaggggctagaacaaacatagtcaaggaagcaagtgcagggcctgaccttcaagaaaggaattaagcaagctttatgtaggactgatggagcaagaccctgatgtgaagagtcccaggcaggaggcctggtggggcttgacctttccttagggagtgtgtgggggaggagtcttcccaaaagtgtcttcagcatagcgtctggaactttcagagagcaacaggaagactttggaactcaattggtttagagcttctcagtggtttgaggagatagatggcaacctaggagtggctggtgtagacagggatagggatcagagccgacaggttattttagggcagtgctcagtatctgggggtgtttttaaaaatagcaatgactaggcaccaccccagactagaggaattagaatatctgtaggtggggcctggggtttgggctttttaaatattcccagttgtttctaatctgtgccagatcagagcacagatcttagagcagtggttctgaaaccttggtgagcatcagagtcacttggaaggcttgctaaaccacagctcactgagccctacccagagtttgattcattgggtctggagtggagtctgagaatttgtatttctaacaagtccccaggtgattgttgctgctggtcaatgacccacactttgagaacccttgtcctagaaccacaaaagggttagggtgttctgtgttgcttttgagtctgtaatgctgacatggaaactgtcatttgtctggataggtgcacttgtttatcaggtaatttttgctattactgtgactttaatttgattgaagctgaaggattcttgttgagggtggtatgtgttagtttcacttactagccctggggccttaggcacattatttaacctctctaagcctcagttttcctcatctataaaatggattagggttgttggattaatcagaaatagtcttggaaaacgcagattatgaacccggcacatagtagatgctcagtatgtggcacctcttatttttgctgcatttggcttttttctttttaaaggcttaagtttttgtttgtttgtttgtttgtttgtttttgagacagagtctcgctctgtccctcaggctggagtgcagtggtgcgatctcggctcactgcaagctccgcctcccacattcacaccattctcctgcctcagcctcccgagtagctgggactacaggcgcccgccaccacgcccggctaattttttgtattttttaatagagatggggtttcaccgtgttagccaggatggtcttgatctcctgatcttgtgatccgcctgcctcggcctcccaaagtactgggattacaggcatgagccactgtgcctggcaaggcttaagttctttctgagggtaggtagagattgacttctgttggctctctcagcccttggagatctcatagaagaaataagacaagtgtactaataattcagaaataaacaatgtggccttcaggtggcctatggctgctcacccatgcttaagagtaccatagcctgtcgaaccagtctggggataaaagttgtgcagtttttaatggtccaaatgagagaaaggaatagcctgcctaatatcttgagtccatctctgttatggcccatttagactaacgcaccagtaggagatgaacaccaactccatgtggatagattaatcaaagaacattggacctataatcctgtggatatcttattaagcatctaatatgtaccaggcatcaggttatatgtttttcatgcattgattgctcactgtgggtcatgggttgggcactggggtttgtaaagatgattaagacttgaagctgcccttagaagttgctaaccttgtgtctctagggtatgactgtaagaaatgatggcaaggaaccttgcacttttagattgggttgatctctgcacatgggtaaaatgaaaatgctactataatttgaaatcacttgaagttatgctatagtggtagtttattgcaacacaataaattgtgacctgcatcactgacttgaatcattggctagatgggccttggtccgttgccacttaggggaaaaccttggtttggattgatgagggttttgcttttgggacgttgttttactttgctgcctgcccgcagcctgtggaatgtttctgctgatgggctggtttcctgcttgcctctgtccttgtatcaagataattcattccacgttgccccggttgcccagtcctggttgtcagactttttggtcctgggagcgttttcatgccttggttcccagacggtgctgatgcagcctgcaggtccacaggctcagacatgagcccactgtgtgctgctttctcagggagccatgagtgcagttgaaataaccttgcacttaaaacctgtcttaccattttgaaaactgttctttggaaatcttgccttgggatttgaacgtctttgcctttaggttttgctcttttgtttctgtttcttttactcattggttttctgcttttgagttttggttgccttgcttcaaaaatcttatatcacgaccatggtttgggactatttctgtcatctccttgttcttctctgggcaagttcattccagataacttgcccctctcctgcacactgttggtgtcatcgaggttccaaagcaatggttttgcagggggcttctcagatcctgagggatatctcagttctgctgtcctcttgcatcatttatgattatattaggtcatgcctgtcctcttgcttctggcctgaactaattcacttacacgtgcctataaggtgatcgaggtgacccaatgatcttcttttagccacaatacctattccatgatccttgctgaagctattgccagacagtgatgaaatagggattgatttgtcactcactgtgactaagctaagctggctgtgtgtgagcttgggcagtttcactaaacattccccttaccctaggattcctccctcagccagggtggcatggtgaaggcagggaattgcccatcctaaattagctgatcccaaagacttcattttcttgggagtcttgtcaccaaatagcccttggggacaggagtctttttgccaccattattagagtttaaattcttacctattactgatttaagggctgtagaagagagaagggccaagaggccaagctgtacaaggggctccagctccaaggagaaaaggatggtggctggggagtgggtgctctgggaacagcctgctgagcactttgaaatatggctagtgccactgaggaactgaatatttaattttacttaattccaattaatttaaatagccacatgtagctagtggcccctgaatggaacagtgcagtgttaaaatcagtacagagaagtatttagagcttggccttcagggctttgattcagattccggctctgctgtctacccattgagtgaccatagggacacttcttaaccttctacagttgtttcaagaatttgttgtattcaatataaagggtttagaacagtgcctggcaagaagtgtgtgtttagttaatgttgacttatcatatgttcactcggtattttgaatggaatggtagtagaattcatgtggaatatgaaatgccactgttttttggggtggggtgtgtgcgcgtgcgtgttatgttttctttcttttaaaaagaaattgttcttttgttgctctaggttgctgcagcaactggtcacacagtagtgttggtagaccagacagaggacatcctggcaaaatccaaaaagggaattgaggaaagccttaggaaagtggcaaagaagaagtttgcagaaaaccttaaggtaatttcttattatcgatgtcttcaagacaagtcctctgactgctttacatttgcagggcaatgggggatttctggctttctttctttctttttttttttttttttcagtttgttagtgtaaaactcatttttccataactttaaaccaatataataacataattactaaacattcagggggtactgattacaaaacaggagaagtaaataaccattttgttgggtgggatttgaggttgagaagaaagcttgtacatacaggtggtgaactcattctagaagaacatgagaatttggaattgaagaacacttgttttgctaaaaggatggaagaagaagaaacaggaagataatttttatactacaagttaagaagagaatgatataataaatatggtatttatagaaactaagagtgaatcattctacttgccaggagcagaagagatagaagaatttgaggaactctgtggaggctgggaatacaacagcatggtgggatgagaaggagttggtgactaagggccatgctgtttttcagcgcactttcacttaggagtttgcatttaattagaaatacagcacaaatcacccaaacaaattttaatttaccttttgtcatcttgttaaagttgcttaagattgatttccttggggcttggatagaatttctcgctgtatgcagccagagaaaagtacacataaggcatttgttgtttctcacttcaagtatccaaggtggtatatctagatgcttttaaaaatttttttattatggtagaatatataacataaaatttgccattttaaactatacaattcagtagcattaattacactcgcacattcatacttcatgtaagtggaatcatacaatatttgtcctgtgtctagcttatttcacttagcataaagttttcaaggttcatctatgttgtaacatgtgtcacaacttcattctttttttttttttttttttctgagacagagtctcactctgtcaccaggctggagtgcagtggcacaatctcagctcaccgcaacctccacctcctgggttcaagcagttctccttcagcctcccaagtagctgggattacaggcgcacgccaccacgtccagctaatttttgtagttttagtagagatggggtttcaccatgttggccaggatggtttcaatctcttgaccttgttatccacccacctcggtctcccaaagtgctgggattacaggtgtgagccaccactcccggccaacttcattcctttttatggcttaatattccactggattattatcatattccaatttaatattccattggatttataccacttttttttaacccattgtattagtctgttctcatgacattgctaatgaagacatgcctgagactgggtaatttataaaggaaagaggtttaattgactcatagctccacatggctgggaaggccttacaatcatggtagaaggcgaaggaagaacaaagtcatgtcttacatggcagcaggcaagagggagagcatgtgcaggggaactgtcctttataaattaccccccactgggcccctcccacaacacgtggggattattacaattcagggtgagatctgggtggggacacagagccaaaccatatcactcattcatctgttaatggaattgggttgttttcaccttttggctattttgaataatgctgcagtgaacattggtatgctattggtttggagtctctgttttcaattctttgggttatatacctacaagtagaattgctgggttgtatggtaatcctatatttagctttctgaggaaccaccaaattgttttctgtagtgactgcactattttacattcccaccagcaatgtacgaaggttccaatttccccacatcctggccaacacttgctattttccatgtttgttttgttttgtttcttattgtagccatcttaggtgtgaagtagtatctcattgtggtgtttttgttttttgtttttttgttttggaaatgaggtcttgctctgctacccaggctggagagcagtggcatgatcatagttcactatagccttgaactcctaggctcaagccattctctcacctcagcctcccgagtagctaggactatagatgtgagccaccacacccagctaattaaaaaaaaaatttttttttagagacagagttgtactgtgttgcccaggctgctctcaaactcctggcctcaagtgatcctcccaccttggccactcaaagtgctgggattacaagcataagccaccgagtcctgctatcattgtggttttgatatgcattttttccccaatgtctaggtggcctttagatgatggtggagataattttaccttctctaggatgaaattcaaataataaatgtcacaggcagattaatgttagaaatgcttgttctttggtgctgtaaagaaatagcacttgaaataaatttaatttcctcagcaagaccatttttactttctgcagaaagggtacactcgccagcatttttgccacaagagtacaccgaacaaaggagacagggtcatttataacctgacacgtccatcttactgctgtgtccggtttctattggctgggacgggacttcacattcaaatgtatttgtcttgattggctagcaacttagaactttttgaaagaggcaaaggcagatgagaacaaaggaaggaggaagtaacttgtggaatgctgagaaaggtaaaaacacctctaaataaggaagaggaacaggctatgacctaatgcccacttggaccagtataagcatgccagggcaaatatttaggctaaattgtgggagctaagaacataaagtacattgatttctttattacagctagcagatattgaagaatgttaacaggtcttagaataaattttgcttctaagaaaagttactatttattcttaattagatggggaggagagtctctttgaagaggaacttctactttactttttacattaagatattcttcacctgtcccttatattcttttttgttgagacggaggagtcttgctctgtagccaaggctggagtgcagttgcgcgatgtcggctcactgcaagctccacctcccgggttcacgccattctcctgcctcagccttttgagtagctgggactgcaggcgcccgctaccacgcccagcaaatttttgtatttttagtggagacggggtttcaccatgttatcccggatggtctcgatctcctaacctcgtgatccgcctgcctcggcctcccgaagtgctgggattacaggtgtgagccactgcgcccggaccatctgtcccttatattcttaattgtagtgggaccccatgcaggggatgttatgaggagggtccagacagatgagattataagagccctgggctgagggttggagtctaggacagagtgagtttgacccagatagcctgcattttctgcttgtttacagactttcagctaattgtctccttgggctgagtttctgagccacaccctaaagataaaaggatggcccctatgctcaagttgctcagctctggctagctactcctcagaagtctatactcctgaggtttctctcctctgccagggacaccactgaggagggaggtgtcagtttctctgcctagttgacatactatgcttatctagctctatactgaccaccaatataatagctactcacaagtggctactgagtgcttgaaatgtggctagtctagatagaaatgtgctctgagtgtaaaatagacactagattttaaagctataataggggaaaaatatataaaacatctcaatatttttaaatattgagtacctgttaaagtgatggcatcttagatatattgggttaaataacattaatttcacctgcgaatgtcttttccctttttttaatgtggctagtagaatatttctgtataacagctgagatctagctgcttattccatgatgattttggatgcctttgctgattatgactattttgatgccctgtggacaaattacactatgaaataaaatggcggcttatagaggcaccatctccaattctgtccttattgaggtctgtggaaacctggagtcacaggagaaaaatgaggaaacgatgaaaactacaggctctttggcagcagaggctgtgtctagcttgtttcggaaacaacagtttcaggcatatgacagacaataattatttgataaatgctaagtcggctttcttaccctggctcttgcccttgctctaataggagctagtctctgcttttattagagaggaatagtcagcaccacctcaagactaatggatggcagggagctatggaaggataaattacaggcttcgtggacactttgagaacagatagggtaggccaatacaggtgctctgaacacccagtttgctaactggagcagagctaagaacttgaaagataatttccagtgagcccggtgaatgttctcttcttcctcccactgcattaggccggcgatgaatttgtggagaagaccctgagcaccatagcgaccagcacggatgcagcctccgttgtccacagcacagacttggtggtggaagccatcgtggagaatctgaaggtgaaaaacgagctcttcaaaaggctggacaagtttgctgctgagtatgtaacctctggacaatcttctttttttttttttttaaccttatttttgtttttcatttttattttttgtttttatagatttgtgagtacaagtgcagttttgttccatgcctatattgtgtagtggtgaagtctgggcttttagtatacccatcacccacatagtgaacactgtacccaataggtaatttttcaaccctcgccaccctcccaccttttgaactctccagtgtctgttatttccctctgtacatccatgggtacctgttatttagctatcacttatatgtgagaacatatggtatttgactgagttgtttcacttaagataatggccttcactcctgttcatgttgcttcaaaagacatgattttattcttttttatagctgagtagtattccatggtgtatatatgccacattttctttaatcagccattgatggacacttaggttgatttcgtgtctttgctattgtgaatagtgctgcaataaacatatgagtgcaggtatctttttgatagaatgagtttttttcctttgaatatatacccaatagtggggctgctggatcgcatggtagttctgtttttagttttttgagaaatctccatactgttttccttaaaggttgtactaatttacattgccaccaccagcatgcaggggttccctttctccagattctcaccaacatctgttggttttgactttttaataaaagccattctgactggtatcaggtgctaaactcattgtggttttaatttccatttctctgttgattagtgatgctgagcattttctcatatgtttattgaccactagtgtgtctttttttgaaaaatatctgttcatgacccctggacattcttgacagattctgaggggtccctccctgggccttgaactttcctccttgtttattgccttctcccaggaagggatcctttgaccaagtttatccacctccctctctcctaccccacagctatttcaagaaaagccaatatggtttccgttgttctccatcctcccactcccagtttgcttctgaagcttgggctgctgtgatctgatccttgtcccagatgcgtgtagaattacccatggtaacatggaggggtccatccagggacaggcctatgtttcttgaagtgtgtaggtcatggatactcctatgccagaagctgctctgacgttccttggttcatttcacactggcatctagaggctgcagagacatctgacagcagacagttaaggacatgtagggtacttctgtgctccactctcgggcataggagtaccctacgtgtccttaactgtctgccaaggaccctcagagcagttctgtgtttcctccttttttggatggagcaaacagaatggtgtaattgaagggaatgcctatagacagagaggactttcctgttttgagcttcatctgggttcaatcgaagtactcttgggagtgttaaaggagcattgacttcttagctggctggcttcctggtggaattcttcctggcagaatgtaccttgggatccagagccttcgagtgtgtgacacctgacccactgatcagtgctcttctagtgacttgtttgactatattttcatgcttcttggttggaattgaatggcagaataagattatatgacaaaagcaattctcagggcacttccggtgggcagtggctaaagagagtcacttgcataccagcttgtcggaatgttaaccttcagagatgggtggccttgtggccagagaggccctgcccctgacaaagagaagagacttgcctttctgtcatctgtccatcactgccaatcagtgtcctcgtgcatttcacactggcatctagaggctacagagacatctgacaaaaacagaatatacttgtggtaccgggactggctcccaggccagcagggagccctctgggataataaacagccaccccaaaaaagggagttttgtcaagcagtttgatctttattgaaaagattggtcgctcttggtgacagtgaaaggcctgactgccctccattgtccatgtctggtacagaagaaggatcactggagaaagtcaggaggcctgggcctggtgctgaccccctcaccacctccagccttggaaaggtcctcagtttcgtcatctgtaatgcaagttgaggtgattggggtaaataatttcctagacctttctggctctaactctctaagactagcttcccccatttgtaaaataggagcagcagcactggtacctattgtacagagttgtttaggaaactcatttcatttagctcacatttcctgagtgcctgctgtgtatcaggcactacactaggctctttaacctgaattgatgcaaaacagatatgaggtgtgaaaagaaggcatgacccatagtcataccaaagatgtgactttgctgctgaccttctccacctttcttggcactgtttgtttttgttttagatcaccaccattattgaatgcttgctacaatttttaagcagccgtattgagaggtactttactgacaaattttacagttcgatcctataatgggagaagaaaatatagtcaagtgatacatttcgggttggaagccctgatgaaacagttgcatcctggagagaacatgacttctctagcagcagcctaagacacacaaatgaaaagtatgaccagacgcacaggcagccagatcgaagtcctgactttcccctttagacaaagtacagactcttgaatcctttgccatccccaccaaccctcttgtcttctttatactagggtctggggccattgctaataatcactgtgcttgtgttgtcgattttcttttagaacatttaagagaaaagtagtttttttggtacctgagtgtccgaatgaaaaaaacaaaagatggttcaagacaagtgtttccaggaacatgtaagagtactttttttttttttttgagacggagtctcgctctgtcgcccaggctggagtgcagtggcatgatcttaagctcactgaaacctctgccccccaggttcaagcaattctcctgcctcagcctccctagtggctgggattacaggcatgcgctaccatgcccagctaatttttgtatttttagtagagacggggcatgttggccaggctcgtctcgaactcctgacttcaagtgatccacctgcctcggcctcctaaagtgctggtattacaagtgtgagccaccgtgcccagcccagagtacattttgtttgtggatgaaaagactgtcctatgtgtttagtattctctgaagacagtgtgagacttttaggaacaaagtcagcctgaccctgttgggagaggcagaagcagaggtctgctggggagagatcatttcctccttctgataaaatgtgccagagtgccctggactggtgatacctggaactgggctctgatgtcactttattttaccaaatgtgcccaagtttcccctttttgcaggtgaatggcccttcaaacattctacaaaaaggggtattacgattgtaatactaatctttaaaataacactttcttttcttaacgggagtgtggagccacagctggcacagccttgggcccaggctgtccctgctctgtttttgtggttccaggtgcttgtggtgcaggttgtgtggttgaacagtgcttgtgttggccacacacattgttattggaagaggatctttttttcattaccttctgtaatggggaatagtttatattattttccccaatgaccaaaagcaagaaactttgaaaactgaaattttaagaccttaaaacaatgtcattttttttttaaaaaggaaaccctggcatttaaatggcctaccttggaagctgttggagaaggtggatgtgctcatacctggaaagagaaggctctccgctgcctacccacactggtctcgccttttacctcttttccctcctttccaaataactggtttcttctcccttctcttcctcctctcctcccacccgcccctgatttgagcagattatagtattgcctgttaggtaagcagaaacccccaagcctggtcagtaagggatcctttcctttcctgccctgttacagtccatcttggttggaatcagcaccaggcctgtttgtatgtttttatccgcaaggtggcgctgcaggaaagcctggaagtcaacctgtttaaagcttttcctctcatgcttttggcacgccactttactgtggccttaaagaactaaatttggtttaagtcagtatggattttttttaatgaataagttaatgtcttatatatgcatatgcctatatcctcttttccccatatctacccatgtaaccttaaaatttttttgaaccatgttggtgttcttgttttcattttaattcccattcaattgaaaaataaagcttttcacttcagggaaaatatcttaattcacgtttattatcatatgtttctgattgaggatttatgtgttcatttagaattttgttgcttttaggtgtctttctttcattattttttgatcactgagtttcgtttgtgactggggttggttaagtagcttgatcaattagccacctcttgttatctcacataccttggaagttaactaatacaagtaggtaggggaaattttgttctggaaaatcaaggaaggattggtgaaggttaaatacctcttcggaacaggaaattccaattttatttcaaatttaaaaatttttaaaaagctgaagtcacttgatttcagcctcttatatgaagatgtgtcttctccctcattcccccaatgggtcaggacaacagatgtggcagtaagcagtcaccttgtgcattgcatccaagagtcatgctgttttgaaagaagagattcactctgatactcccactatattttctcttcacagacatacaatctttgccagcaacacttcctccttgcagattacaagcatagctaatgccaccaccagacaagaccgattcgctggcctccatttcttcaacccagtgcctgtcatgaaacttgtggaggtcagtgggtgtcagcttgtgtgtgtctgcccgctctgccagctctctcagtcctgcttttctgtgttacaccagccctgccaccagttgcctaggatgggttttaacctgagggtagaaggttgtccctgagcctcatatctaggagggcttctatgctttgtttcttcacagccctgtgtcttgcttagtgatatccagaaaggctgttaactttgtggaatgtcatttacttatttgtgccagagctgatgggcagtgctgagaggcatcagaatgggaaggcagcactagaaaccgtgggctggatgggaccacacagagggcagctacatgtgttcatattatctcgtcgaggtcagcttgcccatgctgtaaatgcagttctcattagatacactatactagcttgtccacagttcctggggttaattctgaccccatgtaatggtgccttagcgttgtccccagatgaggtacatctcctgtgcattgtgatcagagctattaaaaccagctcccattgggtgcggcggctcatgcctgtaatcctagaacttttggaggtggaagttagtggattgcttgagacccaggggttcaagaacagcctaggcaacatggcaagaccccatttctacaaaaaataaaaaatcagccaggggttttggtgcacgcatgtagtctccagtacttggaaggctgaagtgggaggattgattgagcctgggaggttgaggctgcagtgagctgtgattgcaccactgcactccagcctggatgacagagcaagatcctatatcgaataaaaaaaccctaaaagtaaaaaaataaaaccagcttctgatagccttgagcctcctgaccataaacctggaaggtggagcggggaggcagggagggcttccccagcatcctgtttggaatgcttggagactccaatatgttggagttggagtcacagtaggcaatttgcacctgaaatgggacaacttgccttttacagggtcctaattacagggtctgaggagcagccgctattaaagtagcatttgttctgaggttgaggagttattgccctgcgaagtgtgggggacgctgatgctgccatgtgggtgatgtggggccaggcaaacctacacacactggctgtggcctctctgggagtgtgtatcgtctgttttcttcattattgccttttccaactaccttttccttcctttatcctcctcattccctcaccactactcagcataagcatttttaataagtcataataatgaccattttttttagcattttctctcaagtgacaactttgaccatcttgcaatgggactttttctgtcttactaacattgcttctcagcttcctcctattttctcctatcccctaaggctgattttttgaagaaattgaagaatgaaggggagggatttggggaacagaagaaacagcatttaacagctcttatctcatgcagattaagagcaaagaagtggcatgcatttccaacatttcagtacttagggactagttgatttctttagttattatattgtatatataagtgttttggagataggcacattctgtagatttactttaataatgttttcaactgcatttatctggtaatgtatgcttttgtctttggaaatgtagtgtgttggttgttaacagctgatgtttagcaaatgctactattttttagaaagtattttgtaaaagtgttcttctctattcagtttttattgtttaactttagctcttccttgtgttgctggtggtgtacaccaaaataacttgtataataagctaagtggctcctttacttaggactgggctcatttaaatgtatatatatatgtattttttttcagactctgttggaactaggagcagcgtatctgtacaaattactgttcgttgaatgaatgaatgagtgaataaacatccatctctcctgtttaaaaagaaacaaaccttcactattattaactcccttaaaccaaaaacttaatttgaaaactccatagtcagcagtgtttgtcccccagctcagtctgtggttttgatggagactttttagacctcctttcaaacagctctgggattctgtttgatttgtggtacccgcagggtggcttctggtctttctcgtcctgctcctcttctccatcttcactgtgtcttttcctgtttccatccattcacttctcttgatgtcacgacatgacaccatggcccaggctgtgatcacacgaaaacaggagtgagaactcttctttgtttatatagcacctttcatccctgcacagacactagctcattagttcaccgagtcagacggccctcttgcacagggaagacatgcccatgatccccattccagagaagagaggtgaggcagttgcctaagatcccatgaagggtctaaagtaaaccctttgactccgattgaagttctttactggcctttacattttacatatatatatgtgtgtgtgtgtgtgtgtgtatgtgtgtgtgtatgtgtgtgtgtgtgtgtgtgtgtatagttgaatgaatgagtgaataaacacgcatctctcctgtttaaaaatatatatatatatacttcatctggttctttccatttaccattacacatgagttctctaactgcttactgagggctgactgtgccgggcatcgtgcttggtgccatcccctacagatgccagtagggcagcccttgtgcccttgcctgtacctcacagaggtcaggagggctgctggagcaggtggcaggccccgcttgctgtaaatgaaagccttccccagaaggatgagtctgttctgaagccaaggggccgctggcctctagagcatctgtgtggcagagggtggagtcatgggagaaatactcaggaatccaggagaactgtcacttgggcaaattactcactttcctggggctcctcctcctctataatagaagatcaggtcccacgtagaagactttaagggcaaccatcatatacttccagacttctaataattaaataatggaagtcagcatttattgagcatttgtgcttaggctttgtgctttactcccaatgtaatttcattctcacctcaacttcctgaggtgaacagagtgatttcagtgtcatttcagtttcaagaaacatactcagggtcacacagccagtaagtggtgcaactgaacccaggcttgtctcaacaacaaagcctgtaaaactgtcctatacacacacgtacacacatacacttgtattttaagccgtgattttgtacattctacagtacactgttgtctttttttttttttttttgagacggtgtcttgctctgtcacccaggctggagtgcagtggcatgatctcggctcactgcaacctccacctcccaggttcaagcaattcttctgcctgggcctcccaagtagctgggactacaggcacatgccaccatgcccaactaatttttgtatttttagtagagatagggtttcaccatgttagccaggatggtctcgatctcttgacttcatgatctgcccgcttcagcctcccaaagtgctgggattacaggcatgagccaccacatttggcctctgttttaaaatagtcattttgggaaatacattgtttctggcttgagattcctacttctatgctgaaactcaaactatttttgttgcctatatggagccttttgatcaatcattccttgaaccattctaccgaagttgcttgctgacactctggtcataattctctgctttgcatttccaggtcattaaaacaccaatgaccagccagaagacatttgaatctttggtagactttagcaaagccctaggaaagcatcctgtttcttgcaaggtaagagtatgggtagcttgggaaggaggtagttcttttcttcttggaccctgacttgttcctggtagaattcttctcatagaatgatgtgaaagaaggagcattgtatactgcaagcttgtccacatgctgtaaagagcaatccgtgcctcctgttctagtttgtagacagggaaactggactcctaagccatgcctaaggccattatgtggatagtctgagacctgaatggagctcaggacaccagctgagtagaagacacgggactgctctctgtcctggcttttgtctcctgatgaatggctgcattttcataaatgattttaggtacagcttggtaaacacatacctccctaacagaaaatgagggctttacttttgcaagaaatactacagatggtgaaataaatgataagacagtgagagagcaacctgccaaaatagcaataaggaacctgtttctcaccgggaagttgcattatgtttttattgtttgttgttttgtttttcaagaagcagcatggtttagtgggaagcctgcttgacctccatcttttttttcccctttcttaagctgcccagttattgtatataaaataatcccagttgctgaaatgataacctacctgaaggtaattattttgattaccttcagtttctccatttgctttagttcctctttagttcccccaaaactcggggactatacttatgcatgactttgcagtttttcttaaggggtagttgtgtcacaaaatgctacaccattacaaagatttacatataagtcatctactttttttttaactgtaatcctttgtatcattatagttctcatagcaaacttttgctttctaaaatattctcgagtttgaacttacagtactgtactaacccatgaaaaatcatgttgttcatgaatcacctgaagaagccatctgttgaggtggactccagcagccaaagagagcaggcttgtgtgtcctgctcctccccgtccatgggtaaagtgttgttagggagtctcatgctttaacacccattttttgtttgtttggttctgtagttttaagtcatctagatttctaaactcatattaataattggatgttatgattgtactttcttacgcagttatgctttgttagtggaagaaagtagtaatggtattgaaaagaacatctgtgcaagacaaaaagatatggaaacagaagtacagggaaaagctaatgattatcttcagcagcataataattaatctacaaagtaatgattcagtcttccatcagagtggccacggcagctgcagagatgggaactctttgttctcattaaattatcttgttaggtcattccagaactctctctgtgtggtattctaagggctttcagagggtctttctgggtcagttattgaagctctttatgaggcatctggacaatatatggcaactacataggacaagggtcagcaaacttctgtaaaggaccagatagtgaatattttcagccatacagtctctgttgcaagtagtcagttctattgttgtagcatgaaaacagccatagacagtatatgcaatatgagtgtggctgtgctccagtaaaacttgacttacaaaaacaggctgtgggctacagtattgtactttaccaatacttgacatagaagaggggcattaatgtgcctggaatgtgccttcctagtgagacttcatgaggggattgtggtatataggttaagggtatgaactagcccaactgggtttaaatcctggtgccggcacttattagctgtgtaaccttaggcaagctacttaacctcgctgtgcctcagtgtcctcatgcttcacataaggataattatagtacctctgtcacagggttattatgaggaatgaataaattaatatttttaaagtatttagaacagtacctggcacacagtaagtacagtaaataaaatgtgtttaataaataatctgaaaaatatgaatttgattacataaaataaaattactttatttaaagattgtgtctcctgctaggcacggtgcctcacgcctataatcccagcacttcgggaggccaaggctggtggatcacttgagcccaggagttcgagaccagcctaggcaacatggcaaaaaccctctctacagaaaaatagctgggcatggtggtgtgcacctgtggtcccagctacttgggaggctgaggtgggagggtcgcttgagcccaggatgtggaggctgcagtgagctgagatcatgccactgcactccagcctgggcaacagagcaagaccctgccaagagaaaaaaaagactgtgtcttttcacattccaccaatatactgatagcatctgtctctctgcattctcaatagcatcaaatattattacagtgggggaaaaacctttgataatcttgttggcaaaaatgcgtatttttttgattactagtgagtttatttatttatttttttatttttcgagatggagtcttgcagtgtctcccaggttggattgcagtggcgcaatctcagctcactgcaacctccatctcccgggttcaagcgattctcctgcctcagccttctgagtagctgggaccacaggcgcgtgccaccacacccggctaattttgtatttttagtagagacagggtttcactgtgttggccaggctggtcttgaactcctgacctcatgatcctcccgccttggcctcccaaagtgctgggattacaggtgtgagccactgcgactggccagtgagtttaaatatttaatgagtcttggcactttttccttattgagctctatgagctttttctgtagaagatattaactgttggagcttcatgttctcaggtaccctatcttgagtctatagtgaaccttttgaagttgaaaagagtatttttgcctcaattataaaatctgtattgttccataatcttaattaagctgataaaacttgtttgtgcatctttgtgctcatgtggcaatagatggggttagggcttggtttcagtttgcctagggttaaaggaggttcacatcctttgtgttactgtccagtttccccgcatgcagtcaggttagctctgtgaggagtgcctggtcatctgtaattcagacattaaggaagtacctggtgtgtgctagaaacagaatgcagagttcaggccagggtgaggatttctgccctcaggaagatcacagccttttgacaaaagaggaggcaccatttgcctagtggaaatcagcttcaacaaaaaaatcacctgcttttctctacaagtccccggaagagatcagtagataaaatccaaatcccacacctgtcctccagagagatgattattgttagttactgagaagggaaatggatgaaaggcatatgtggcacaggggtcaccgcaggatgcagaggtcttagggggtgtgccgtgaaaggccagctctctgtcagaggctctgctcctttgtcggagcacgtgccctcaagtcagctccactgcagtgtgcgctggaacctgagaagttgctgagtagccgaggagtggctccaaggagcctggaaagcagtcctcctttgaggaccattcaaggtggagtgtgacgttttgtcgattcttgaaagggaattgggaggaaagaggaggaataaagggatgggtgtagggctgtgtgtacagcattttatgtgttttctgatttatcttcacaactttgagacaaactgtcacccccagttcacagatgatgaaacagattcagagtgacagaaggaccaagagagtattcaagattgaacccaaatctgtctctcccaaagccatgctcttccaggtcacacctgtgccttgatctgtctttatgtcaggatctgtgcagtggggcatctgggtttgaatgtttttttaagtactatgattgttggataaattgtcatatgagatagaaataaggccatgctgcaaattttgaaaatgtacagcttgataaatgggggcaaacatgatccagggtaagaaggggcaatttggtgacttcacaaaagataccatttaatgaaaatttactagttttttgtttttctgtctcccaaaacaggacactcctgggtttattgtgaaccgcctcctggttccatacctcatggaagcaatcaggctgtatgaacgaggtatccttctgacccaggccaggagcagcagacctcagctcctggcgccactgtctggaattctcagtgtctctaggaggggtcgggccgtgcacaatggaggaagcagtgtctgttttctagctttgtgagctcagctgcaccctgagccctggtacctttttcactgttttcccagggcctcctggcttccctgtgggcctctgagaaaggtttctggaactcccaccacccccactacagtcccagccagagcaattgcatggccggcccagattgatatcctggatctctgcttttgattaaaaggtttactgcttttaaaaataatcataatgtaaaaatcactaggctaggagatcttgaaagttccttaaggttctaaaacttgtgactgacaggtgattagaaatatgtgacaaggccgatatgtggtaaggacagtttttagtagtctgtccttactgagtgatgtcatgatgtactttttgtaaccttaagaatggtgtaaacagttttcctcagtacttgattgacaaagaatgcttttctctgctgtagaaatatcagatttgggacagggtccaggcctctaaattgatctgcattctcctgcctgctttccctccctggtttctggaaaggtagctctcatgtctgcttcaaaggcaaacaagccttaataggactggataaaaagcaagtgtaattgttttcaattacttcattcataaatgctcactcctgagagtgtcattttttaaacaaaacatttacaccagctcttccagagagatgaaagcacatttgcttcctcaaaatctgctttaaatattaaaacttttctctatggtttatggaagcaattgcctcacttttgctccaagatcaaaccaacagttctggtttatctatcaacaaatatgcctaattacacctcaaagaaagcacagagcattttaccctaccttgaaaggcagttgtatgtcttttttttttttttaacaaaatgtaatgttttagaatgtagcatgtgagagatccaccttttaatggtgttttcctcactgtccatttgatgcattctccaatgcaccaagtatcagatggtaagttgaaagccctcttcttgtctgtggtccctttctgcataggtgcatgccctttagccctcaccatccctggccgcctgtgggctgaagctggaagagcaggacctggcctcaggacatgctcttagcttgctctgggcatgggcttcaacagcctatcattgctggtccctctgcttctttttccaccaccttctcagaatctgcttctgaagttgctgggtgtcctgcctggggtgggtgctgcttccctactgcacactacagtcacaccctaggcctcttaccatgtccccccgcccaccacctgctccctcctctcagccaacacagaggagtgctcagagcatgcccaccgtgccatctccgttcatacagttccaccttgaagcttcaagcatctggaggctccttctcgtctgccacatctgttcatcacttttgattccttcctgtcatgcctgttccacctcttcatcccaccttttccccatcccagtcaggctgccttcatgaggttccttaggtagcagagtaattcacgctactcatgtcttttcctgactggtccccgctactgcacttactgagaaagtatcatattgtccaggaagttgagacaccgcctactgcatctgcccacacaccccctgcacagcctcggcaggagctctgtgactgtttctgaactcatgcaaggagaaattttctgtaccccactgttgatacacctggggttccaggcacatggtttggccaatgctgccttgagtggtgcaggctctctggaaggatgtgtgtgctgttgtaggtcaggcctcctggatgaccgggcctctgccactaacacttcttgccagtccccatgggatctcgtggaggctcacgcccttttgctctgctgtttgtccactcattttggcttccatgttgggccttctttcccagtatcccagctccgtcctcactcttcctattgctcttgttcgttcacactgtgactgaggcctgatgcatgccccagtcactgtcactcctgtgagtcagagggacagaggctggataggctgtgtctgacagtggactgctgcccttgccaggcacccactcctaatggccagtgtgggcaggatggtggggccaaatggtcagctcttctcaggagggctctgctggcaacaggcctgggagcaccatgagcctgccccccagtcaccatgtgacatcttgctcacattgtcgcccctgctcaagacaggctcagtggttctctggtttcctgccatctacaagctctgccagagagccttccttctggccaacctctgcccctgctgttatcaccgccaactactcctgccattcccacgttgccccacctgagtgtctgcagagctcccagctggacatcatctctgtcatcacaactcttcttgctttggctctcccttgggtcacttgtcactgtcttccctgtggcatggcaggtgttttctttcccttactatactctcttttctggggcactctggctcctcctcatcttcatatgtcccaaggtgctgtgtagggcgggcacataggcagctgctgatgagtaaaaatgctgtttctgagttgttgctaagtgcctctgttgttcatgctaagaatggttggcaggtggtgctgctgagccagacaaagaagcagatgttgggcaagtcccagcccctcagctgtgctgatctggagttcactgaggaagctttcctttgctgtcttgtctggagttaggggctcttaactggagggaggtaggagagggtgtccaatgaacctcctaaagttgacgcagaatttgggttatatgtgcattttttatggaaagggtgtctgattgtcagaagtacttgattctaaagaagtttaagaattattagtttaaaacatgattccacatctaactgtcacttggcacaccaatctctgtattttgtttctctgtttctgaaagtttgcctcttttgctctgcattattgagaacacgatctttagagttgggctgactttgtagagttatttagatatttttctatcatgtgctgtatcttcatattatttcttgaaataaaacagtcctcaagtgagtctctgaatatggaattacagcgttgcttctagggttaattgtcctgtccttgaatatagatttcattaaatggctttagctgagttgcaaccattatgctgtcagatttctgtcccagggagactgccagtaacaaatgaaccagtacataagcatgttaggttgtgatgagtaattgtggagaagaagatagtaaggggtggcaagagtcttgtcctagtgtcctggccttttctttagtgcagggagttgctttttttatatatgcagggaggagaagaggctgtcagaagtatgacacctgagcagaggcctggaggaagtgagagactgagctccgaagctgtctgagggcagcacctaggcacagggagcatatcccaagcctgaggagcctgtgaggccggcacttccagcattccagggctctaccagcacagaagctgcggggcttcctaatgaaatcctctgagtagaacccacttttaagcttcatagccacaccccaaatatgctgtgttccttcccattcctgcctctgcatgtgctgttctctctacctagaatgcccttcctggtctgctcatctcaggattatcttcaccttccaggacccaggcatgggggtggttttggtgaagccctggcagtgtgagtaaatctctccatctttactcacacagagctgtgtgagtcatgaatcttcaggtcttattatgttgaagtttttggcttacacatctgagttctcccattatgtcatgagtaccttgagtgcttgtctggtttatctttgtctcattctacatctctggtgcctgctacataatgaatagaagttgaatgaatgaatgaatgaatgacgctgcctatatgattatttttgtttctttgctttcttatggcctaacactcaaatcatgatttctcaggcgtctctaatcctaattagtgtagttattagtaatgtcaaccataataaataattgtggtgtattttagtcaccttaaaatgccttgaaatcctttggaattactttagtaatttatttgcttttaaaaatatatcttctttatcgatgtttaagtagtttctctctgagtgtcttaacatttttccctcttttctttagctttgatctgattgacttcttaatgctttggaacaaaattctagatagccacctgttgcagactattctacttttctgatttcaaagaaagggaacagattgttctccataaaggcctcttggggccaaaggacatagtaaatttccaagggaaaagcacattgatccttgtcgtagtctactcaacagacttccaaacgtgtggtgattctaactcgggtttgggcttttctttaaaaggtatcttgactaaaaggtttgtgtgaaatgtgatgccaggggaatactccttacttgtaaaacccaaaaaactgggggaaagaatacatacaataactatacatacaaaagcagaaagcttagttttctttttaagaaagtttatttataaatcaaaaatatgctgtagcattaaattatactttaataaatgattccagagttggaaaatcccaatgtatttgaaagtagctgaagtttcaggcatggagacttctgtctccatgaacagggtatcagtactccaaaattcacctcagtggtgcgtagctttgaaaatcttgggccacacactgtggcttacacctgtaatcttagcactttgggaagctgagacgggaggatcacttgaggttgggagtttgagcccagactggccaaatggtgaaaccctatctctactaaaaatataaatattagccttgtgtgggggcgcacacctgtagtctcagccactagggaggctgaggcaggagaatcacttgaacccaggaggcggaggttgcagcgagccaagattgtgccattgcacttcagcttgggtgacagagcaagactctgtctcaaaaaaaacaaagtcttatgacctctttggcatgtactttagagaggaaatcttacccaagccagaaagtctcagtctaggcattttttttattgtgcaagcatataaaattctagtaattctggggctaatcctgtgatagggagaattcaaggaaaggtggtggtgacccagtgctgccgttttctccttaggtgacgcatccaaagaagacattgacactgctatgaaattaggagccggttaccccatgggcccatttgagcttctagattatgtcggactggatactacgaagttcatcgtggatggtaggaattggaattttttgttgtctttaattgaggtagtttttctgaactgtaaattataatgcctttttaaaaaaagttagcaggggtcttaataaagaccttccaaaatcctgcctcaccaggttgagaattcatgaacagatgtcaggagaaggaagaatgtgactgtctagtgtctctttaacagggtgaccttgaagaaaaaaaaacctttatggattcacaggaagttacaaatatagcacagacaggtcttgtgtgtgtgcccttcacccagtttccaccagtggttatatagccatagtacaatattaaatcccaggaaattgacactggtacactgtgttatcacatcaatagatttgtgtaacctccattgcaagcaagatacacatccattttaaaaaatatatccattgtaatgtaaaagctctgaagacagggtaaaaataataattaaaactggactactgaagttgaatgtagctatctgttcccaagtttcacagaatgctagttgaagaattaaattttgaatcttatgtggatgcaaaataccaatggcaggaatgcagattttttaacgtgtattctgaaagttaactgtgccagtgatgaatccaaccagcaaattaatggcttctgtcagtgtacttgggcctttggccgtagtgatttctgagaagacactggataagcaggaggaccatagtagggccaggcttcaggcagcacaggtgggtggcagtgcagcagctttggggctgatgtggctgcaccagcacagccttccttggtgcctctgcagtggtggccggaggggcgccatgcctggggggctctcccacatcagaggcaggcctccagacttgtccttggaaatgccaagatgtaaaaataaacccagcacttcatcctgagttctcttccctccgctcaatagggtggcatgaaatggatgcagagaacccattacatcagcccagcccatccttaaataagctggtagcagagaacaagttcggcaagaagactggagaaggattttacaaatacaagtgatgtgcagcttctccggctctgagaagaacacctgagagcgctttccagccagtgccccgagtgcctgtgggaatgctctttggtcagacattccctcacacagtacagtttaataaatgtgcattttgattgtaatctatcgaagtgattattacaccagttacagcagtaatagattctccattaagaaataattcccttttttagtctgttcatttctgtgtattttctaaacagctttacacccttggtgccttggagcaaacatgttttttgaaccttgtcatttttgtgaagaattgcctagattccttctctcatcaacgggaaagtacttcctctgagagtgcgagtgcaccatgctcactgttgctgcgtgggagagtcacaagccactggcaagcaagtggtatagtctgtgaagcactgcagcgagcagcacctggatcttgcctttataagaacattttactacctgcagctttgagtcttgccctacattttgggcatgacataagatgtgtctttattcagctcgtcgtgaagatgctgctgctgaatgggtcagcatatctctgtttgcatggtttgcaggaggtcggttttcatggtcattcagttccacagatctgaatgattactgtctgtctgtgtcttttttccatgagaaatcactgttgcaaattgcctataaattgactctactaaaataacaatgtttcagtctgaaaatttgaattgaaaaaaatgtataatataaaattgtaatacactcaaatgattataaaagtaaaagttggtaatttaggcagaa

SEQ ID NO: 20 - DNA, 1608 bp, Homo sapiens
  source 1..1608: mol_type = genomic DNA; note = HBB_gene
acatttgcttctgacacaactgtgttcactagcaacctcaaacagacaccatggtgcatctgactcctgaggagaagtctgccgttactgccctgtggggcaaggtgaacgtggatgaagttggtggtgaggccctgggcaggttggtatcaaggttacaagacaggtttaaggagaccaatagaaactgggcatgtggagacagagaagactcttgggtttctgataggcactgactctctctgcctattggtctattttcccacccttaggctgctggtggtctacccttggacccagaggttctttgagtcctttggggatctgtccactcctgatgctgttatgggcaaccctaaggtgaaggctcatggcaagaaagtgctcggtgcctttagtgatggcctggctcacctggacaacctcaagggcacctttgccacactgagtgagctgcactgtgacaagctgcacgtggatcctgagaacttcagggtgagtctatgggacgcttgatgttttctttccccttcttttctatggttaagttcatgtcataggaaggggataagtaacagggtacagtttagaatgggaaacagacgaatgattgcatcagtgtggaagtctcaggatcgttttagtttcttttatttgctgttcataacaattgttttcttttgtttaattcttgctttctttttttttcttctccgcaatttttactattatacttaatgccttaacattgtgtataacaaaaggaaatatctctgagatacattaagtaacttaaaaaaaaactttacacagtctgcctagtacattactatttggaatatatgtgtgcttatttgcatattcataatctccctactttattttcttttatttttaattgatacataatcattatacatatttatgggttaaagtgtaatgttttaatatgtgtacacatattgaccaaatcagggtaattttgcatttgtaattttaaaaaatgctttcttcttttaatatacttttttgtttatcttatttctaatactttccctaatctctttctttcagggcaataatgatacaatgtatcatgcctctttgcaccattctaaagaataacagtgataatttctgggttaaggcaatagcaatatctctgcatataaatatttctgcatataaattgtaactgatgtaagaggtttcatattgctaatagcagctacaatccagctaccattctgcttttattttatggttgggataaggctggattattctgagtccaagctaggcccttttgctaatcatgttcatacctcttatcttcctcccacagctcctgggcaacgtgctggtctgtgtgctggcccatcactttggcaaagaattcaccccaccagtgcaggctgcctatcagaaagtggtggctggtgtggctaatgccctggcccacaagtatcactaagctcgctttcttgctgtccaatttctattaaaggttcctttgttccctaagtccaactactaaactgggggatattatgaagggccttgagcatctggattctgcctaataaaaaacatttattttcattgcaa

SEQ ID NO: 21 - DNA, 44358 bp, Homo sapiens
  source 1..44358: mol_type = genomic DNA; note = LDLR_gene
gtgcaatcgcgggaagccagggtttccagctaggacacagcaggtcgtgatccgggtcgggacactgcctggcagaggctgcgagcatggggccctggggctggaaattgcgctggaccgtcgccttgctcctcgccgcggcggggactgcaggtaaggcttgctccaggcgccagaataggttgagagggagcccccggggggcccttgggaatttatttttttgggtacaaataatcactccatccctgggagacttgtggggtaatggcacggggtccttcccaaacggctggagggggcgctggaggggggcgctgaggggagcgcgagggtcgggaggagtctgagggatttaagggaaacggggcaccgctgtcccccaagtctccacagggtgagggaccgcatcttctttgagacggagtctagctctgtcgcccaggatggagtgcagtggcacgatctcagctcactgcaacctccgcctcccgggtttaagcgagtctcctctctcagcctcccgaatagctgggattacaggcgcccaaccaccacgcccgcctaatttttgtatttttagtagagacgggttttcaccattttggccaggctggtctcgaaccccgacctcaggtgatctgcccaaaagtgctgggattacaggcgtcagccaccgcgcccggccgggaccctctcttctaactcggagctgggtgtggggacctccagtcctaaaacaagggatcactcccacccccgccttaagtccttctgggggcgagggcgactggagacccggatgtccagcctggaggtcaccgcgggctcaggggtcccgatccgctttgcgcgaccccagggcgccactgccatcctgagttgggtgcagtcccgggattccgccgcgtgctccgggacgggggccaccccctcccgcccctgcccccgcccctttggcccgccccccgaattccattgggtgtagtccaacaggccaccctcgagccactccccttgtccaatgtgaggcggtggaggcggaggcgggcgtcgggaggacggggcttgtgtacgagcggggcggggctggcgcggaagtctgagcctcaccttgtccggggcgaggcggatgcaggggaggcctggcgttcctccgcggttcctgtcacaaaggcgacgacaagtcccgggtccccggagccgcctccgcgacatacacgagtcgccctccgttatcctgggccctcctggcgaagtccccggtttccgctgtgctctgtggcgacacctccgtccccaccttgtcctggggggcgccctcgccccaccagccccgatcaagttcacagaggggcccccggccaccctcaaggcctcggttccttacgaggttgaaacgttgcctcagaatctccccgcccctccttggtctgcagccgagatcttcagccacggtggggcagctatcccccgggaccgaccccctggggtggcctcgcttcttcagaggctgtgaatggcttcggttcagctgtccaagcggcgatttttcctctgggtgaaatggattagattttagatttccacaagaggctggttagtgcatgatcctgagttagagctttttaggtggctttaaattagttgcagagagacagcctcgccctagacaacagctacatggccctttccctcctgagaaccagcctagcctagaaaaggattgggattgcctgatgaacacaaggattgcaggaaactttttttttaattggcaagggggttggctttgactggatggagagctttgaactgccttgaaattcacgctgtaactaacacaccagtttcctctgggaggccagagagggagggagggtgtaatgaaatacggatgattgttcttttatttttatttacttatttattttttaactttttgtagagatgaggtctcgcttggttgctcaggctggtcttgaactcctggcctcaagcgatcctcctacctcagcctcccaaagtgttgggattacaggagtgagccaccgcgccccaccggggatgatgatgattgcaaacattctgccactcagttttacaaaagaaagagaggcactggattaatgtgtatctcactcaccaatcaacctcttccttaagagaaaatgttaaggaagtcttaggcaaggccttgtttgttcatcactttagtttctctctcccgggatggctgagaatgtgatgtttcctctgttgtcaaggagactacacccctgatgttttcctccagacttctgagagctggtgtgtgtttctagcactttctagctgcaccacctcacgctgtagctggcttcaaggcatatccaggggggagtttcttgtccatttcctttacaaagggaagttgttggaatctgaaccgcaagccttcacttagaccaaaatcaggcaacagcggtgagcgcagctccaaacgtgtcaatgactcacccaaatttgagtaagggagttggctgctttaacgagccgcagggtgattcccttgtcatttccggaaatacctatcttccagggaacactgggaaaaaacagggagacctttgttgagacagaaaacctgtaggggaattctgttcctcattcctgctcttatctgtagacttcctccctgataagatccaattctagatgggtcggttgctccttgctttgatgggtgctttgatgggctttattattattattattattattattattattttgatgggctttttgatgtcccttttccttccacactctgtcccaactgtcaagcaaatagccttttgttgctaagagactgcagatgtaaccgaccagcagcaaacagtgagtcaggctctctcttccggaagcaaaatcaattgctgagatcactctggggaaaatacccaccttatttggaaagaagcactgatcaattgatgtctattttttttttttttgagttggagtctcgccctgtcacccaggctggagtgcaatggcataatctcgcctcactgcaatccccgcctcccgggttccagcaattctcctgcctcagcctcctgagtagctggaattataggcgcctgccacaacacccggctaatttttgtatttgtagtagagatggggtttcaccacgttggccaggctggtctcgaactcctgacctcgtgatccacccgcctcagcctcccaaagtccaaggattgcaggcgtgacccactgtgccagccaatcaattgatttctcattcattttcagctggctctgttcccttaagccaggggattttcgtttgtttgtttccccttcaaggaaatgattctagctacagttttgatttccttgtacaactgttttcagtagcacagggaaagaaaacatcgaaagcattcaccacctcatttgtgtgctgggggaaaaagcagaaatgtgtattctctttttttgtttcgatgaccttgttcctgacttgttactcgtgacttgagagatcagagggctagaggactagaatttatagaggtgttttttttgtttgtttatttttgttcgagttgcccaggctggagtgcagtggcgcaatctcggctcactgcaacctctgcctcccaggttcaagcgattcttcggcctcagcctcctgagtagctggaactacaggcgcccgccaccacacccagctaatttttgtatttttcagtagagatgggatttcaccatattggtcaagctggcctcgaactcctgacctcgtgatccacccgcctcagtttcccaaagtgctgggagtacaggcgtgagccgccgtgcccggcctttttgtgtttttgtgtttttgagaggagctcattgctttttaggcttccctagcgtgagaaaatctggggatccatgctctagtttacttcctttttttttttttttttgagatggagtctcgcttagattgcctaatctcagctcattgcaacttctgcctccggggttcaagggattctcgtgtctcagcctcctgggtagctaggatacgggcacccgctaccatgcctggctaattttgtacttttagtagagacagggtttcgccacgttggccaggctggtctcgaactcctgacctcaggtgagccgcctgccttggcctcccaaagtgctgagattacaggcgtgagccaccgcgcttggcctaatttgcttttcctgaaattcaaatggtctaatatgaaaaacgccaaccttgcttgaaagaataagaaagaggtgcggtttcgttgggccgttgatgtttggaacaggactggttttgtccccttgctcggaaagggcagcaactgtgaggacagctccctgacgtgctctcactcagcactgttccgttcctgagcactgtccccactagctaggccaagggagctcatttggcaggcaactgctgtctggctgcgcctgtggcagtaaaatctgcctttattttttggaggcagggtcttgccctgtcgctcaggctgaagtgtgcagttatagctcactgcagcctccagcttctgtactcaactgatcctcctctctcagcctcctgagtagctgggactatacgcacgtgttaccactcccacctcagtttgtttgtttatttatttatttatttatttattgagatggagttttgctcttgctgcccaggctggagtgcaatggcgcgatctcggctcaccgcaacctccacctcctggttcaagcgattctcctgcctcagcctcctgagtagctgggattacaggcatgcaccaccacgcccggctaattttgtatttttcgtagagatggggtttctccacattggttcaggctgttctcgaactcccaacctcaggtgatccacccgcctcagcctcccaaagtgctgggattataggcgtgagcccccgaacccggccactcccagctaagtttaaattttttgtttgtttgttcgtttgtttttattttttgagacagagtctcccgcccaggctggagcgcagatcactgcatccttgacctcccaggcttaagccatcctccccactcagcctcccaagtagctgggattacaggtgtgtgccactatgcttggctaagttgtgtattttttgtagagatggggttcaagggattctcgctttgttgcctcggttggtctcaaactcctgggctcaagcagtcctccctcctcagcctcccaaggtgctggggaaatccacttttgaaacattgtctggagagttgcccaggtggtagatcacagaaataggtcatcgtggggtccttcccatgggtgcagtcttgagccacctgtggccagcaaatatttggagaataatagtcaggggagagcttgaggtccagggaaaggttttgtttttcttcagggaaaggtttttattgttctttatccctccttaaaggaccttcaggtgttactgacattcccggtctacccagtggcacatttagtttgtaagctgggccctcgtacagaggtagggaggtgagagcattggattagtggtcaccaaagctgcggtcacctagtggggtgatcagaggctcctcccttaagatcttgattgccaacgcctctggcccaactttcctttttatttatcgcaagcctcctggaatctcaattgctttttgcccacccggtgtgtcagcacaagaaatgagtcatttcctcctttaagcacagttgaaattgagctgtgagtcagtgaggtgtgtacgatattgtcaaagcggggtgtgtacagtattgacagatctgtagttgggcaagagaattatcagagtttgtgaccacagcagattccaaagctcgactcattttcttctctcttccttcccttttttcttttctttttttttttttttttgacagagtctcgctctgttgcccaggctggagtgcagtggcacaatctgggctcactgcagcccctgcctcctgggttcaaatgattctcatgtttcagcctcccgagtagctgcaattacaggcattcgggttcaagtgattctcctgcctcagccacctgagcagctgggattacaggcgcccgccaccacgcccggctaatttttgtatttttagtagagacggggtttcaccatgttggccaggctggtctcgaactcctgaactcaggtgatccgcccacttcggcctcccaaagtgctgagattacagacgtgagtcaccgcgcccagcctgttctgttctttaattctcaaaacaccctctaggaagtagagactgccattctcccccattttacagatcaggaaactgagtcccagaaggatttagtcagttacccaagttgttctagttaaatggcctggaaagccagtgaagcccaggattgtctatctaacccccttactactctaactttcagggaatccacatgaatgtgctgggtcaaccatcaaagttgaaatggataaagggggctggatgcggtggctgatgcctgtaatcctagcactttgggaggccgagatgggtgggtggattgcttgagcccaagagtttgagaccagcctgggcaacatagtgagacacctgtctctgcaaaaaataaataaaaagttagctgagtgtgatggtgcacccctctagtcacagctgttgagttaggcttaggcaggaggatcgcatgaacctgggaggtggaggcggccgtgagcctcagtcatgccactgcactccaacctgggcaacagagtgaaagccggtgtccgaaagagaaagaaaaaaagacatagatacatcttttaaagttaggttgtatgttaattacctacaactcagtttcaactgtgcttaaaggaggaaatgactcatttcttgctacatatcaaattagcccaaaatgtagtggcttaaaacaacacatttatgatttctcagtttttgcgtgtcaggaatttggaagcagcacagctagacggttccagctcagggtctctcatgaagttgcaatcaaaatattggcaggagagaaaaacatattttcagaagctgcaggcataggaagacttggctggggttgaaggatccacttccaagatggcgcactcagtggctcttggctggaggcctcagttccctgctgcgtggagctctccctccagctgcttgagtggactcatgacatgcagctggcctcccctggagcagtcgatccaacaatgagcatggccatgaactaggctcagaagccactccctgtcgtctctacattttcctatcagaagcaagtcattaaaagtccagtgccactccaggggagacgaattaggctctgccttctgaaaggattatcacagaagatgcggtcctatattctttttttaaaattattcttttttttattttgtagagatggggtcttggtatgttgcctaggccagtctggaattcctgggctcaaacaatcctgtctctgcctcccaaagtgttgggattacaggcatgagccactgcacctggtcatgtggtcatattttctttttcttttttttttttttttgagacagagtctctgtcgcccaggctggagtatggtggcgtgatctcagttcactgcagcctccgcctcccgggttcaagcgattctcctgcctcagcctcctgagtagctgggattacaggcgcccgccaacatgcccagctaatttttttagtagagatggggtttcaccatgttagccaggatggtctcgatctcctgatttggtgatccgcccaccttggcctcccaaagtttcaaccatcgatcagaacttattgatgtacttatgtagctaggcacggtggcgcgtgcctgtaatcccagctacttggaagggttaaggcaggagaatcgcttgaacctgggaggcagaggttacagtgagtcaagatcataccattgcactccagtctgggcaacagaatgagactctgtctcaaaaacaaaaaacaaacccttgtatgtgattttcctggatagcatctgttacatcttcacaaagataaaaagtcagacttggctgggcatggtggctcacacctgtaatcccagcactgagaggctgaggcaggcagatcacttgaggtcaggaatttgagaccaggctgggcagcatggtgaaaccccgtctctacaaaaaatacaaaaattagccgggtgtggtgtcacgcacctgtattcccaagctactcaggaagctaaggcaggagaatcacttgaacccagaggtggaggtttgcagtgagttgagattgtgccattgcactccagcctgggcgacagagtgagactctgtgtcaaaaataaaataaaataaaattttaaaaaaggcagatttttttttcttcttggtattgttaccttattatagtaataataagtgcatagtgcatgctgagataagcaatcataatttgttattgcggccgggcatggtggctccagcctataatcccagcactttggtcaggagttcaaggccagcctggccaatatagtgaaactccatctctactaaaatacaagaaattacctgggcatggtggcagttgctggtgatccccagctacttgggaggctgaggcaggagaatcgcttgaacctgggaagcagaggttgcagtgagccaagattgcaccactgcactccagcctgggtgacagagtgagactctgtctgaaaataataataataataatttgttattgcttttattgccttagtttacatagggaatcaaagtttatactttgatttataaaagttgctttgattctagttcacagaaccagaatctttcatataaaggtattagagggcccagtgtggtggctcatgcctgtaatcccagcatattgggaggctgaggagggaggatcactttaggagtttgaggccagcctaggcaacatagtgagaccttgtctctacaaaaaattccaacattagctgggcatggtggcatgtgcctgtagtcccatttatttggggggctgaggcaggaggatcacttgagcccacgaggttcaatccaggttgcagtaagccatgatcctgccactgcactccagtttgggtaacagagcgaagctatgtctcaaaaaaagaaaaaaaaagtattctaaatccaaatttaatatataaaactaaatgcaggccaagtgtggtggcatatacctataatcacaacactttgggaggctgaggtgggaggattgcttgagcccaagagttcaagaccagcctaggtaacacagtaagaccccatctctacaaaaagtagaaaaattagcctggcatggtggtgagtgcttttaatcccaactacttagggggctgagatgggaagattgcttgagcctcagagtttgaggctgcagtgggccgtgatcgctccactgatcgctctaaagtgagaccctgtctcaaaaaaaaagaaaatagaagaaaactaaatacattcaataagactttgatctcttttccaaggtgtaaatatattttgggaaattttccagttactttgttctcattttaatgtaataatctaagtcttggttttctaaggaaaagttttctcttattatatcttttgttaatgtttctctcccatttcttttgatctgatcttcagatacatgattatcttcactgctaaatttgtgttctctggcctctacatttataatttctcataattctttatctaagtatttcttccctacctactgaagaaaactcaagttttcttccaccttaatgattatgctgtgtctgtgagttttcttcatgactctttacagtacaagttttttgtttttgtttttttaatggtcagatggatagaacaacacaggttttgtttgttttgttttaacttttaaaaaaattataatagataaagggtctcactacgttgtccaggctgatctcatactcctgggctcaagcaatccacccacctctgcctcccaaagtgctgggattacagtcatgagccaacatgcctgggcagtacaggttttttttgagacggagttttgttcttgttgccgaggctggagtgcaatggcacaatcttggctcaccacaaagtctgcctcccaggttcaagtgattctcctgcctcagcctcctgagtagctgggattacaggcatgtgccaccacgcccagctaattttgtatttttagtagagacggggtttcaccatgttggccaggctggtttcgaactgctgacctcaggtgatctgcccacctcggcctcccaaagtgctgggattacaggcatgagccaccatgcccagctgtagtacaggttttaatatgctaaatactcttcctttctttattaatgtgcatggaagttctaatatttttttcccataccccagagagtccatattttggaatcaacaacactagcctttgttgacaagtgtctctcttgggttccttctttgtgtcctccactgaattttggggttcataaaatttcatttgttgtgcttgcttaattccctgggaatcagactgttcctgatcggatgacatttctggttaattctttagttggcaggaaatagacacaggaaacgtggtcagtttctgattctggcgttgagagaccctttctccttttcctctctctcagtgggcgacagatgcgaaagaaacgagttccagtgccaagacgggaaatgcatctcctacaagtgggtctgcgatggcagcgctgagtgccaggatggctctgatgagtcccaggagacgtgctgtgagtcccctttgggcatgatatgcatttatttttgtaatagagacagggtctcgccatgttggccaggctggtcttgaatttctggtctcaagtgatccgctggcctcggcctcccaaagtgctgggattacaggcaccacgcctggcctgtgacacgattcttaacccctttttgatgatggcggctggaaaagtggccagtggattttgatgtattcaatcatgaattaggaggtggggagagaatgaattattggagctttccttaaagccattaaatggctctattgttttttcaattgatgtgaatttcacataacatgaaattaaccagctcagtggcattaatacatctgcaatgctgtgtggccaccacctctatcttgttccaaaactttgcataacctaatgtctttttttttttttttttttgagacggagtctcgttccatcacccaggctggagtgcagtggtgtgatctcagctcactgcaacctccgcctcccaggttcacgccatcctcctgcctcagcctcccgagtagctgggactacaggcaccctccaccacatccggctaattttttgtatctttagtagagatggggtttcaccatgttagccgggatggtctcgatctcctgacctcgtgatccacctgcctccgcctcccaaagtgctggcattacaggcgtgagccaccatgcccggcctatttttttttttaagagatggagtctaattctgttgcccaggctggagtccagtggtaccatcatacttcactgcagccttgacctcttgggctcaagtgattctcttgcctcgaactcccaaagtattgggattacaggtgtgagccaccgcactcagcctaatgtccagtttttaacaagctccatttaaatgccctccgttttgacccataaaggggtaggcttggccgggcacaatggcttgtgtctgtagtcccagctacttgggaggctgaggcagaaaggcagaaagattgctttataaagcccaggagtttgagggccacctgggtggcatagctagacctcatctctaaaaaataagtaataaataaatatttgtttttgtttttttctttttcttttcttttttttttttttttgagacggagtcttgctctgttgcccaggctggagtgcagtggcgcgatctcagctcactgcaagctgtgcctcctgggttcatgccattctcctgcctcagcctcccgagtagctgggactacaggcgcccactaccacgcccagctaattttttgtatttttagtagagatggggtttcaccacgttagccaggatggtctcaatctcctgacctcgtgatccgccagctttggcctcccaaagtgttgggattacaggcgtgagccactgagcccgccccatatgtatgtatatatatatttttttaaaatgggagaccaggcatggtggctcatgcctagaatcccagcactttgggaagctgaggtaggcggatcacttgaggccatgagtttgagaccagcctgctcaacatgatgaaacttctatctctactaaaaaaaaaagtgggattaggtcaggcacggtggctcacacctgtaatcccagcactttcagaggccgaggcaggaggatcatgaggtcaggagatcgagaccatcctggctaacacggtgaaaccccgtctctactaaaaaaatacaaaaaattagccaggcgtggtggcgggtgcctgtagtcccagctactcaggaggctgaggcaggagaatggcgtgaacccgggaggcggagcttgcagtgagccaagatcgtgccactgtactccagcctgggcgacagagcaagactctgtctcaaaaaaaaaaaaaaaagtgggattgacattctcttcaaagttctggggttttcctttgcaaagacaggattggcaaggccagtgggtcttttttgtgtgtgtgtgtgtgacggagtctcactctgccacccaggctggagtgcaatggcaggatctcggctcaccgcaacctcctcctcccaggttaaagtgattctcctgcctcagcctcccgagtagctgggactacaggtgcccgccaccacacccaactaatttttgtatttttagtagagacagggtttcactatattggccaggctggtcttgaacccctgacctcacgtgatccacccgccttggcctcccaaagtgctgggattacaggcgtgagccactgtgctcggcctcagtgggtctttcctttgagtgacagttcaatcctgtctcttctgtagtgtctgtcacctgcaaatccggggacttcagctgtgggggccgtgtcaaccgctgcattcctcagttctggaggtgcgatggccaagtggactgcgacaacggctcagacgagcaaggctgtcgtaagtgtggccctgcctttgctattgagcctatctgagtcctggggagtggtctgactttgtctctacggggtcctgctcgagctgcaaggcagctgccccgaactgggctccatctcttgggggctcataccaagcctcttccgcccttcaaatccccccttgaccaggaggcattacaaagtggggatggtgctacctcttcgggtttgtcacgcacagtcagggaggctgtccctgccgagggctagccacctggcacacacactggcaagccgctgtgattcccgctggtcgtgatccccgtgatcctgtgatccccgccccgtgaggctgaacacatagtgacgcttgctagccaagcctcaatgacccacgtaacatgaagggggaaaagccagaaagttctgccaaggagcaaggccaagaatcccgaagggaaatggactttgaagctgggcgtcttcttggctgtcttaatacaagtggcacatccaaatccaaaaccccgaaattcaaagtcttgagcacccgaaattctgaaacgtcttgagcactgacctttagaaggaaatgcttattggagcattttggatttcggatttttaccactgagtgtggagtcctaattaggaaaaaaaccaggctgaccgaaccaaaggaaagcaataaaagaaggcagatagggtcaggcacggtggctcacccctgtaatcccagccttttgagaggctgaggcgggtggatcacttgaggtcaggagttcgagagcagcctggccaacacggtgaaaccccatctctactgaaaatacaaaaactagccaggtatggtggcgtctgcctgtaatcccagctactcgggaggctgagacaggagaatcacttgaacctgggaggcagaggttgcagtgagccaatatcacgccattgcactccagcctgggggacaagagcgaaattctgtctcaaaaaaaaagaagaagaaggccgacaaactatgtaactctgcctttctccatggtccagaacacacagccctcctgcgtaaataactccttatcttcctgctcccagctatcatcagacacctcggctgatagaaaattgcaagttagctcactgcaacctcggcattataagtactgcacaaagccctcttcagcgcacagcacaagcaccattctataaaatctccagcaagcggccaggtgcagtggctcatacctgtaatcccagcattttgggagactgaggcgggcggatcacctgaggtcaggagtttgagaccagcctggccaacatggtgaaaccccgtctctattaaaaatacaaaaaaattagccaggcgtggtggcaggtgcctgtaatcccagctacttggaaggctgaggcaggagaatcgcttgaacccgggaggtggaagttgcagtgagccgagatcttgccatcgcactccagcctgggggacaagagtgagacttcgtctcaaaaaaaaaaaaaaaaattcccagcaagcctttgtcttctggcagtcagctcctctcttgctgacctgctcattgctttcttgcaaggtattttcctacctactttctggaataaatctgtctttctgtacttacaactaccttttttaaaatttctttcttttttgagatggagtctcactctgtttgcccaggctggagttcagtggtgcaatctcagctcactgcaacctctacctactgggttcaagcgattctcctgcctcagcttcccgagtagctgggattacaggcgtgcaccagcacgcaggctaatttttgtatttttagtagagacggggtttcaccatgttggccaaggtggtcttgaactcctgacctcaagtgatcctcccacctcagcctcccaaagcgctaggattacggccatgagccactgaggccggctgcacctacaactgtcttgataaattcttacccccacaccactggtccagatagtcagtgctcacccacaacattaaggatattccaaatttgaaacattccaaaatcagaaaaatattccaactctgaaaatattccaaaatccaaaaaaattcaaaatccaaaacacttctggtcccaagcattttagagaagggatactcaacccaaaataaggacagcaattctataaattgtgctaccatcttgcaggtctcagtttaacagctttacacctattagcgcaccagtgctcatagcagtgctgggaaatgtgtacagatgaggaaactgaggcaccgagagggcagtggttcagagtccatggcccctgactgctccccagcccgcctttccaggggcctggcctcactgcggcagcgtccccggctatagaatgggctggtgttgggagacttcacacggtgatggtggtctcggcccatccatccctgcagcccccaagacgtgctcccaggacgagtttcgctgccacgatgggaagtgcatctctcggcagttcgtctgtgactcagaccgggactgcttggacggctcagacgaggcctcctgcccggtgctcacctgtggtcccgccagcttccagtgcaacagctccacctgcatcccccagctgtgggcctgcgacaacgaccccgactgcgaagatggctcggatgagtggccgcagcgctgtaggggtctttacgtgttccaaggggacagtagcccctgctcggccttcgagttccactgcctaagtggcgagtgcatccactccagctggcgctgtgatggtggccccgactgcaaggacaaatctgacgaggaaaactgcggtatgggcggggccagggtgggggcggggcgtcctatcacctgtccctgggctcccccaggtgtgggacatgcagtgatttaggtgccgaagtggatttccaacaacatgccaagaaagtattcccatttcatgtttgtttcttttttttcttttctttctttattttgtttttgagatggagtctcactctgtgatttttttcatctctaaatttcctacatccatatggccaccatgaggccccaggctggccgatggttgctgttagcttattgggaaatcactgtttggaaggtgctggttgttttttgttgtttgttgtttttgtttttgtttttgttttgagacggagtctcgctctgtcgccagggtggagtgcagtggcgcgatcagctcactgcaacctccgcttcctgggttcaagccattctcctgcctcagcctcccaagtagcgcggattacaggcatgtgccaccacctccggctatttttttttctatttagtagagatggggtttcaccatgttagtcaggctggtcatgaactcttgacctcaggtgatccacccgcctcggcctcccaaagtgctgggattacaggcgtgcactgctgcacccagcctttttttgtttttttgagacagggtcttgctgtcacccaggttgaagtaaggtggcacgattatggctcactgcggccttgatctccttggctcaagcgatcctctcacttcagcctctcaagcagttggaaccacaggctgtaccaccaagcctggccaatttttttgtacagacacaggctggtcttgaactcctgggctcaagcaatcctcctgccttggcctcccaaagtgctgggattccaggcatgagccgctgcacccggcaaaaggccctgcttctttttctctggttgtctcttcttgagaaaatcaacacactctgtcctgttttccagctgtggccacctgtcgccctgacgaattccagtgctctgatggaaactgcatccatggcagccggcagtgtgaccgggaatatgactgcaaggacatgagcgatgaagttggctgcgttaatggtgagcgctggccatctggttttccatcccccattctctgtgccttgctgcttgcaaatgatttgtgaagccagagggcgcttccctggtcagctctgcaccagctgtgcgtctgtgggcaagtgacttgacttctcagagcctcacttccttttgttttgagacggagtctcgctctgacacccaggctggagtgctgtggcacaatcacagctcacggcagcctctgcctctgatgtccagtgattctcctgcctcagcctcccgagtagctgagattaaaggcgtataccaccacgcccggctaattttttgtatttttattagagacagggtttctccatgttggccaggctggtcttgaactcctggtctcaggtgatccacccgcctcggcctcccaaagtgctaggattacaggtgtgagccactgcgccaggcctaatttttttgtatttttagtagagatgcggttttgccatattgcccaggctggtctcgaactcctgggctcaagcgatctgcctgccttggcctcccaaagtgctgggattacaggcacaaaccaccgtgcccgacgcgttttcttaatgaatccatttgcatgcgttcttatgtgaataaactattatatgaatgagtgccaagcaaactgaggctcagacacacctgaccttcctccttcctctctctggctctcacagtgacactctgcgagggacccaacaagttcaagtgtcacagcggcgaatgcatcaccctggacaaagtctgcaacatggctagagactgccgggactggtcagatgaacccatcaaagagtgcggtgagtctcggtgcaggcggcttgcagagtttgtggggagccaggaaagggactgagacatgagtgctgtagggttttgggaactccactctgcccaccctgtgcaaagggctccttttttcattttgagacagtctcgcacggtcgcccaggctggagcgcaatggcgcgatctcggctcactgcaacctctgcctcccaggttcaagtgattctcctgcctcagcctcctgagtagctgggattacaggcgcccaccaccaagcccgggtaattttttgtatgtttagtagagatggggtttcactatgttggccaggctggtgttgaactcctgacctcatgatccgcccacctcggcctcccaaagtgctgggattacaggcgtgacccaccccatgaaaaaaaattaaaaaatgaagcgatgctgggcgcggtggatcacgcctgtaatcccagcactttgggaagctgaggcaggcagatcacgagggcaggagattgagaccatcctggctaatacggtgaaaccccatctctactaaaactacaaaaaattagccgggtgtggtggcaggcacctgtgatcccagctactcaggaggctgaggcaggagaatcgcttgaacccaggaggtggaggttgcagtgagccgggatcacaccattgcactccagcctgggtgacagagtgagactctgtctcaaaaaaaaaaaaaaaaaaaaaagcgaattctgaaatacatgaattcttttccttagatgcctgcttctgtcttgaggtttgttgttgttatttcgaaacagagtcttgctctgtcgctcaggctggagtgcagtggcatgatcttggctcaccacaacctccggctcccaggttcaagcgattcttctgcctcagcctcctgagtagctgggattacagctgaatgccaccttgctgggctaatttttgtatttttagtagagatggggtttcaccatgttggccaggctggcctcgaactcctgacctcgagtgatctgcccgcctcctgaagtgctgggattacaggcgtgagccacctcgtcctggtgagggtttttttttttccccaaccctctgtggtggatactgaaagaccatattaggataactgtacagtatagagaaggcagtggcaagttttctctgtcatataccagagtgggcttgggcatggtggcatactcctgtagtctcagctaatcaggaggctgaggaaggaggatcgcttgggcccaggagttggagactgtagtgagctgtgatcacaccaccacacttcaatctgggcaacagagcaagagaccctatctctaaaaaaaagtaagtatttcggacactgtgggccatacggtctctggtgcagtttctcaacatggctgttgggtgaacacaaccacgcacagaacgcaaaccaatacacgtggctgtgggcccagaaaatgttatttatggacacaaaaattggaatttcatataactgttttgtgtcatgaaaatgatttccctttttatttttatttttcttctcaagtatttaaatatgtaaaagccatttttaggcctggcaggatggttcacagctgtaatcccagcactttgggaggtcgaggcgggaggatcacgaggtcaggagatcgagaccatcctggccaacacagtgaaaccccgtctctactaaaaatacaaaaaattaaccaggcttggtggcgcgcgtctgtagtcccagctgctcaggaggctgaggcaggagaatcgcttgaatgcaggaggcggaggttgtagtgagccgaggttgcaccactgcactccagcctgagcgacagagtgagagtccgcctcaaacaaaaaaatgtttgcccatgctggtcttgaactcctgggctcaagctatctgcctgccttggtctcccaaagttctgggattacaggcatgagctacagcgcccggacttttgttgttttatatctatatatctatatataacttgttttatgtatatatataacttgttttatatatatacataaactgcagtaaaaaacatgtaacataaaatttaccttctcaaaccttattaagtgcacagttctgtgccattagcaaattcacactgttgtacaacatcacaaccaccatctccagaacttttttttttttttttattctttttgagacagagtctcactcgtcgcacgggctggagtgcagtggtgcgatctcggttcactgcaacctccacctaccaggttcaagcaattctcctgcctcagccccctcagtagctgggattacaggtgcccgtcctaccacgcccagctaatttttgtattttcagtagagactgactgggtttcaccatgttggccaggctggtctcgaactcctgacctcaagtgatcctcccacctcagcctcccaaagtgctgggaatacaggcatgagccactgcgcccggccccagaactcttttatcttcccaaactgaagctctgtccccatgaaacactcactctccatcccctccccaactcctggcacccaccattctactttctgtccctatgaatgtgatggctctagggacctcctctgagtggaatcagacagcattttccttttttgactggcttatttcactgagccaagtgcggtggcacacgcctgtaatcccaaaactttgggagaccgaggcgggcgcatcacctgaggtcaggagttcgagaccagcccggccaacatggtgaaaccccatctctagtaaaaatacaaaaaattagcctgtcatggtcgtgggtgcctgtaatcccagctaagtgggaggctgaggcaggagaatcgcttgtacccaggaggcggaggtcgcagtgagccgagatcgtgccattacactccagcctgggcaacaagagtgaaactccgtctctcctaaaaatacaaaaaaattagctgggcatggtggcacatgcctgtagtcccagctacttgggaggctgaggcaggagaatcacttgaacccgggaggtggaggttgtaatgagccaaggttggcggcgaagggatgggtaggggcccgagagtgaccagtctgcatcccctggccctgcgcagggaccaacgaatgcttggacaacaacggcggctgttcccacgtctgcaatgaccttaagatcggctacgagtgcctgtgccccgacggcttccagctggtggcccagcgaagatgcgaaggtgattcccgggtgggactgagccctgggccccctctgcgcttcctgacatggcaaccaaacccctcatgcctcagtttccccatctgttaagtgtgcttgaaagcagttaggagggtttcatgagattccacctgcatggaaaactatcattggctggccagagtttcttgcctctggggattagtaattaagaaatttcaggccgggtgcgtaatccctgtaatcccaacaccttgggacgccgaggcgggcagatcacctgaggtcgggagttccagaccagcctgaccaacatggagaaaccccgtctctactaaaaatacaaaattagccgggcttggtggtgcatgcctataatcccagctactcaggaggctgaggcaggagaatcacttgaacctgggaggtggaggttgtggtgagccaagatcgtgccattgcactccagcctgggcaacaagagtgaaactccatccaaaaaaaaaagaaaagaaaagaaaaaaaagaaaagaaatttcagctgacacagcttcacactcttggttgggttcccgtggtgaatgatgaggtcaggtgatgactggggatgacacctggctgtttccttgattacatctcccgagaggctgggctgtctcctggctgccttcgaaggtgtgggttttggcctgggccccatcgctccgtctctagccattggggaagagcctccccaccaagcctctttctctctcttccagatatcgatgagtgtcaggatcccgacacctgcagccagctctgcgtgaacctggagggtggctacaagtgccagtgtgaggaaggcttccagctggacccccacacgaaggcctgcaaggctgtgggtgagcacgggaaggcggcgggtgggggcggcctcaccccttgcaggcagcagtggtgggggagtttcatcctctgaactttgcacagactcatatcccctgaccgggaggctgtttgctcctgagggctctggcaggggagtctgccgccctgttaggacttgggcttgccagggggatgcctgcatatgtcctagtttttgggaatatccagttaacggaaccctcagccctactggtggaacaggaaccggctttcctttcagggacaacctggggagtgacttcaaggggttaaagaaaaaaaattagctgggcatggtgccacacacctgtggtcccagctactcagaaggctgaggcgggaggattgcttgagggcaggaggattggttgatcctcccacctcagcctccggagtagctgggacctcaggtgcatgccactatgcctggctaattttcttttttctttttttttttttttcgagacggagtctcgctctgttgcccaggctggagtgcagtggcaggatctcggctcactgcaagctccgcctcccgggttcacgccattctcctgcctcagcctccccagtagctgggactacaggagcccgccactgcaccaggccaatttttttgtatttttagtagagacggggtttcactgtgttagccaggatggtctcgatctcctgacttcgtgatccgcccacctcggccttccaaagtgctcggattacaggcgtgagccactgcgcccagccgctaattttcatatttttagtaaaaacagggtttcaccatgttggccaggctagtcttgaactcctgaacccaagtgatcctcctgccttggcctcccaaagtgctgggattacagacaccacacctggctattattattttttagagacagggtgctgctctatcttccagcctgtagtgcagtgcagcctccatcatagctcgctgcagccttgacctcctgggttcacgtgatcgtcccgcctaagcctctggaggagctgggagtactggcatgtgccaccatgcctggttaatttttttttttttttttttgagacagagtctcattctgtcacccaggctggagtgcggtggtgcgatcttggcttactgaaacctccacctcccaggttccagcaattctcctgcctcacccttctgagtagctgggattacaggttccggctaccaaacctggctagtttttgtatgtttagtagagacagggtttcaccatgttggtgaggctggtctcgattctcccgcctcagcctcccaaagtgctgggattacaggcttgagccaccgtgcctggcttttttttttttttttttttttgtggcaataaggtctcattgtcttgcccaggctagccttatgctcctagcctcaagtgatcctcctccctcagcctcccaaagtgctgggattacaggtgggcgccactgtgcctgttcccgttgggaggtcttttccaccctctttttctgggtgcctcctctggctcagccgcaccctgcaggatgacacaaggggatggggaggcactcttggttccatcgacgggtcccctctgaccccctgacctcgctccccggacccccaggctccatcgcctacctcttcttcaccaaccggcacgaggtcaggaagatgacgctggaccggagcgagtacaccagcctcatccccaacctgaggaacgtggtcgctctggacacggaggtggccagcaatagaatctactggtctgacctgtcccagagaatgatctgcaggtgagcgtcgcccctgcctgcagccttggcccgcaggtgagatgagggctcctggcgctgatgcccttctctcctcctgcctcagcacccagcttgacagagcccacggcgtctcttcctatgacaccgtcatcagcagagacatccaggcccccgacgggctggctgtggactggatccacagcaacatctactggaccgactctgtcctgggcactgtctctgttgcggataccaagggcgtgaagaggaaaacgttattcagggagaacggctccaagccaagggccatcgtggtggatcctgttcatgggtgcgtatccacgacgctgagggctgcagagggaatggagggagcaggaaggagcttcaggaactggttagtgggctgggcatggtggctcaaagcacctgtaatcccagcactttgggaggccaaggtgggtggatcatcaagaccagcctgaccaacatggtgaaacctcgtctctactaaaaatacaaaaattagccgggtgtggtggtgggcacctgtaatcccagctgctcgggaggctgaggcaggagaatcacttgaacctgggagatggaggttgcagtgagccaagacagccccactgcactccagcctgggtgacagagtgagactccgtctcaaaaaaaaaaaaaaaaactaaacaaaaaactggttagtggctagacaacaggatggtatcttccaagcccatggctgactcagcagctcctgggtcaagacactgtgacctgtgtcccctggcaggaagcatcgcccctgccacctgcccggtgtactctgtacctgtcaggtgacatctgctacctaagcacgtgagaggtggcatttcacagtttcagtgtggtgctgacaacccgggacgcacactgtccttgcagctacaatcaggaggtgaatgttgggtttccagcagagaacactggagaaggcacacttggtgtctggaagggaaaagcagggaagagagcatcatcagatgcctgcgggtgaaggtgggcccgctatggccagcgtccctttttatttttatttatttatttatttgagatggaatctcgctctgtcgcccagactgtagtgcagtggtgcgatcacggctcactgcaagctccgcctcacaggttcacgccattctcctgcctcagcctcccgagtagctgggactacaggcacccgccaccacgcccggttaattttttgcatttttattagagacggggtttcaccgcgttagccaggatggtctaaatctcctgaccctgtgatccacccgcctcggcctccctaagtgcttggattacaagcgtgagccaccacgcccggccccctttttattttttattttttgagacggagtctcgctctgtcgcccaggctagattgcagtggcgtgatctcggctcactgcagcctccgcctcccaggttcaagtgattctcctgcctcaacctcccaactaattaggattacaagcatgtaccaccatgcctgactaattttttgtatttttagtagagactgggtttcaccatgttggctaggctggtctcgaacccttagcctcaagtaatctgcctgcctcagcctcccaaacagcggggattacaggcatgagccactgtgcccaacccaaccctggatctcttttaaacaagacaatgctcgctgttgccacagaacaatgggtggggtacatgtggcccagtgtgtttggccacataactgccaggccagagggaaagagactctcagactgtctccactcagatacaaatgtgtgtgttgtgtgcgtgtgttctggtctcatatttgtttgttttgagacagggtgtcgctctgtcactgagtctggagtgcagtggcgcaatcagagttcactgcagcctcaaactcttgggctcagttgattctcccacttcagcctcccaagtagctggaactacaggtgaacaccactgtgcccagctaatttattttatttttagtagagatgaggtctcactatgttgcccaggctggtcttgacctcctagcctcaagcaatcctcctgccttggtctcccaaagtgctgggattacacgtgcgagccattgcgcatggcttgtgttcttgtgtttcttcctttttctttcgagatggcgtctcagtctgccacccaggctggagtgcagtggtgtgatcatagctcactgtagcctcaacttcctgggctcaagcaatcctcttgatttcagcctcccgggcctggccagcatggtgaaaccccgtctctactaaaaatacaaaaatgtagccaggcgtggtggtgggcgcctgtaatcccagctacaccagaggctgaggcaggagaatcgcttgagcctggaaggtggaggttgcagcaagccaagatcgtgccactgcactccagcctgggcaacagagacagactctgtctcaaaaaaaaaaaaaaaaaacccaaacaagccacatttggagtttggggttcccagcaggactatttcccaagcctgagcctggctgtttcttccagaattcgttgcacgcattggctgggatcctcccccgccctccagcctcacagctattctctgtcctcccaccagcttcatgtactggactgactggggaactcccgccaagatcaagaaagggggcctgaatggtgtggacatctactcgctggtgactgaaaacattcagtggcccaatggcatcaccctaggtatgttcgcaggacagccgtcccagccagggccgggcacaggctggaggacagacgggggttgccaggtggctctgggacaagcccaagctgctccctgaaggtttccctctttcttttctttgttttttctttttttgagatgaggtcttggtctgtcacccaggctggagtgcactggcgcaatcgtagctcactgcagcctccacctcccaggctcaagtgatcctcctgcctcaccctcctgagtagctgagattacagacacgtgccaccacggcagactaattttattttatttttgggaagagacaaagtcttgttatgttggcctggctggtctcaaactcagggtgcaagcgatcctcccgcctcagccttccaaactgctgggattacaggcgtgggccaccgtacccagcctccttgaagtttttctgacctgcaactcccctacctgcccattggagagggcgtcacaggggaggggttcaggctcacatgtggttggagctgcctctccaggtgcttttctgctaggtccctggcagggggtcttcctgcccggagcagcgtggccaggccctcaggaccctctgggactggcatcagcacgtgacctctccttatccacttgtgtgtctagatctcctcagtggccgcctctactgggttgactccaaacttcactccatctcaagcatcgatgtcaacgggggcaaccggaagaccatcttggaggatgaaaagaggctggcccaccccttctccttggccgtctttgaggtgtggcttacgtacgagatgcaagcacttaggtggcggatagacacagactatagatcactcaagccaagatgaacgcagaaaactggttgtgactaggaggaggtcttagacctgagttatttctattttcttctttctttttttttttttttttgagacagagttttgctctcgtttcccaggctggagggcaatggcatgatctcggctcaccgcaacctccacctcccaggttcaagtgattctcctgtctcaggctccccagtagctgggattacaggcatgcaccaccaccatgcccggctaattttgtatttttagtagagacggagtttctccatgttggtcaggctggtctcgaactcccgacctcaggtgatctgcctgcctcggcctcccaaagtgctgggattacagacttgagccaccgcgcccagctatttctgttttctttctttcttcttcttctttttttttttctaagagacaggatctcactctgtccccaggcaggagtgcagtgctgtgatcatagctcactgcagccttaacctcctgggctcaagtgatcttcccacctcagcctcccaagtagctggaactacaggtgcacaccaccatgcccagctcatttttgtattttttttttttttgagacagtctcgttctgtcaccccggctggagtgcagtggtacaatcttggctcactgcaacctctgcctcccaggttcaagcgattctcctgcctcagcctcctgagtagttgagattacaggcatgtgtgccatcatacctggctgatttttgtatttttttttagagatggggtctcagtatgttgaccaggcttgtcttaaactcccggcctcaagtgatcctcccacttcagtctcccaaagtgctgggattacaggcatgagccactgcggccggtttgttttcttttttttttcgttttttggagacggaatttcacctttgttgcccaggatggagtgcaatggcacgatatcgcctcaccacaacctctgcctcctgggttcaaaccattttcctgcctcagccttcttagtagctgggattacaagcatgtgccaccacgcccggctgattttgtatttttagtagagatggggtttctccatgttggccaggctggtctcgaactcctgacctcaggtcattcgcccacctctgcctcccaaagtgctgggattacaggcgtgagccaccgtgcccggtggtttgtattctttttactgagagtcgtgaaaggcagtgatcctctgtcacatgtgatcttggctctcaggggacatttggcaatttctagagattttttggttgtcacaagtcaatggggaagactgttggcatttagtgggtagaggctggtgacgctgctgaacacccagaacagggaagtagcaggccctagatagagccatcgtggggaaaccctgctctaaggaaatggcgctattttataaccccacgttcctggcatgattaccaacagccaaaagtggagtccccccaagtgtgttcgtccatttgcattgcagtaaaggaatagctgaggccgggtaatttataaagaaaagagatttaaactgggtatggcagtttatgcctataatcccagaactttgggaggctgaggcaggaggatcgcttgagtccaggagtgtgagaccgagaccagcctggccaacatgacgaaactctgtctctacaaaaaatacaaaaagtaggccaggcacggtggttcacgcctgtaatcccagcactttgggaggccgaggcgggcggatcacgaggtcaggagatcgagaccatcctggctaacacggtgaaaccccgtctctactaaaaatacaaaaacaaaattagccgggtgtggtggcaggcgcctgtagtcccagctactcgggaggctgaggcgggagaatggcgtgaacccgggaggcggagcttgcagtgagccaagatcgcgccactgcactccagcctgggtgaccgagttgagactccgtctcaaaaaaaaaaaaaaaaaaaaaaatacaaaaagtagccaggtgtggtggcaggcacctgtaatcctgggttctcgagaccgaggcatgagaattgcctgaccccaggaggtggaggctgcagtgagccaagatcatgccactgcactccagcctgggcgacagagtgggactctgtctcaaaaaacaacaaaaaaaaagttctggaaatggatggtggtgatggtgatacttccacaacagcgtgaatctgcttaaggccaccgaactgtgcactcacaaatagtcgagatggtacattttatgttatgtgtatttcaccacaattaaaaactagttgtgggccaggtgtggtggttcatgcctgtaatcccagcactttgggaggtcagagggaggtggatcatgaggtcagcagttcgagaccagccaggccaacatggtgaaaccccatctctactaaaaatacaaaaattagccaggcgtggtggcacatgcctgtagtcccagctacttgagaggctgaagcaggagaatcgcttgaacctgggaggctaagattgcagtgagccgagatcgtgccactgcactccagcctggacgacagagtgagacttcgtctcaaaaaaaaaaccaaaaaaaaaattagctgtgggtcaggcactgtggctcacgcctgtaatcccagcactttgggagaccgaggtaggtggatggcctgaggtcaggagttcgaatccagcctggccaacatggtgaaagcccgtctctactaaaaatacaaaaaattagtcaggtatgttggcacacctgtaatcccagctactcgggaggctgaagcaagagaatcgtttgaacccaggaggtggacgttgcagtgagccgagattgggccactgtactccagcctgggcaacaaaagtgaaactctgtctgaaacaaacaaacaaacaaacaaacagacaaacaaaaaaactagttgtggagagagggtggcctgtgtctcatcccagtgtttaacgggatttgtcatcttccttgctgcctgtttaggacaaagtattttggacagatatcatcaacgaagccattttcagtgccaaccgcctcacaggttccgatgtcaacttgttggctgaaaacctactgtccccagaggatatggttctcttccacaacctcacccagccaagaggtaagggtgggtcagccccacccccccaaccttgaaacctccttgtggaaactctggaatgttctggaaatttctggaatcttctggtatagctgatgatctcgttcctgccctgactccgcttcttctgccccaggagtgaactggtgtgagaggaccaccctgagcaatggcggctgccagtatctgtgcctccctgccccgcagatcaacccccactcgcccaagtttacctgcgcctgcccggacggcatgctgctggccagggacatgaggagctgcctcacaggtgtggcacacgccttgtttctgcgtcctgtgtcctccaactgccccctcctgagcctctctctgctcatctgtcaaatgggtacctcaaggtcgttgtaaggactcatgagtcgggataaccatacttttcttggatggacacatcagcaccgggcttgacatttacccagttcccctttgatgcctggtttcctctttcccggccccctgaagaggtgatctgatttctgacaggagccctgagggaggaaatggtcccctttgttgacttttctttttctttatttttttcttttgagatttgctgtcacccagcctggaatgcagtggtgccatcttggctcactgctacctctcccactgggttcaagcaattctcctgcctcagcctcccaagtagctgggattacaagcatgcgccaccatgcctggctaagttttgtatttttagtacagacagggtttctccatggtggccaggctggtcttgaactcctgacctcaggtgatcctcccacctctgcctcccgaagtgctacgattacaggcatgagccaccgcgcccatccccctttgttgacttttctcatcctctgagaaagtctcagttgaggccagcacctccctcaagtgaattgaatctcccttttgaacaacaacaaataacaatatgacccagacgtggtggctcacacctgtggtcccagctactcgggaggctgaggtgtgaggattgcttgagcccaggaggtcaaggctacagagagctataatcacaccacttcactccagcctgggggacaaagtgaaaccctgtctgaaaaaaacaaaaaaagaaaaaggaaaaagaaacaatacgatcacaaagtagatattcatagtgtttattttcagtactcttttttttttttttttttttttttgagacggagtcttgctctgttgcccaggctggagtgcagtggcacgatcttggctcactgcagcctctgcctcccaggttcaagcgcttggctcactgcaacctccgcctcctgggttcaagcgcttcttctgcctcagcctccccagtagctgggactataggcacgtcccactacgcccagctaattttttgtattttttagtagagatggggtttcactatgttagccaggatggtctcgatctcctgacctcgtgatctgcctgccttgggctcccaaagtgttgggattatgggcatgagccactgcacctggccttttttttttttttttttgagatggagtttcgctcttgttgcccaggctggagtgcaatggtgtgatctcggctcactgcaacctctgcctcctgggttcaagcaattctcctgcctcagcctcccgagtagctgggattacaggcacctgccaccacgcctggctaatttttgtacttttagtagagacggggtttctccatgttggtcaggctggtctcaaactcctgacctcaggtgatccacccacctcggcctcccaaagttctgggattacagacatgagccaccgcgcctggccgtgtctggccttttttagttatttcttttttttttttttttttttttgagacagagtcttactccgtcgcccaggctggagtgcagcggtgcgatgtctgcgcactgcaagctccgccccctgggttcatgccattctcctgcctcagccttctgagtagctgggactgcaggcgcctgccactacgcccggctacttttttgtatatttagtagagatggagtttcactgtgttagccaggatggtctcgatctcctgactttgtgatccgcccgcctcggcctcccaaagtgctgggattacaggcgtgagccaccatgccaggcttttttttttttttttttttttgagacggagtcttgctctgtcgcccaggctggagtgcagtgccatgatctcagctcactgcaagctccacttcccaggctcacgccattctccagcctcagcctcccaagtagctgagactacaggggcccgccaccacactcggctaatttttttgtatttttagtagagacggggtttcaccatgttagccaggctggtcttgaactcctaacctcaggcgattcacctgcctcggcctcccaaagtgctgggattaaaggtatgagccacctcgcctggtgtgagccacctcgcccagcctgagccacctcacccagcctaagccactgtgcctggcctgattttggactttttaaaaattttattaataattatttttgggtttcttttttttgagacagggtcttactctgtcatccaggccatcctgtctgtctgtcatcccagtgatgggatcataccttgctgcagcctctacctcctgggctcaagcgatcctcccccctcagcctcctgagtagctgggagtacaggtgtgcaccaccacacctggctaatttttttttttttttttgtatatagagatggtattttgccatgttgaccaggctagtcttaaactcctggactcactcaagagatcctcctgccttggcctcccaaggtcatttgagactttcgtcattaggcgcacacctatgagaagggcctgcaggcacgtggcactcagaagacgtttatttattctttcagaggctgaggctgcagtggccacccaggagacatccaccgtcaggctaaaggtcagctccacagccgtaaggacacagcacacaaccacccgacctgttcccgacacctcccggctgcctggggccacccctgggctcaccacggtggagatagtgacaatgtctcaccaaggtaaagactgggccctccctaggcccctcttcacccagagacgggtcccttcagtggccacgaacattttggtcacgagatggagtccaggtgtcgtcctcactcccttgctgaccttctctcacttgggccgtgtgtctctgggccctcagtttccctatctgtaaagtgggtctaataacagttcttgccctctttgcaaggattaaatgggccaaatcatatgaggggccaggtccttcaggctcctggttcccaaagtcagccacgcaccgtgtgggtcccaaaattttatcaaggcacattcgttgcctcagcttcaggcatctgcccaaaaaggccaggactaaggcaaggagagggagggattcctcagtactcagcttttcacagaggctccaaaaggctaaggaatccagtaacgttttaacacaattttacaatttttttttttgagacggagttttgctcttgttgcccaggctggagtgcagtggcacgatctcggctcactgcaacctctggctcccgggttcaagcgattctcctgcctcagtctcccgagtagctgggattacaggcatgcgccaccacgctcggctaattttgtatttttagtacagaaggggcttctctgttggtcaggctggtcgtgaactctcaacctcaggtgagccacccgcctgagcctcccaaagtgctgggattacaggtgtgagccaccacgcctggccttttttttgagacagagtctcgctctcgcccatgctgtactgcagtgacgcagtctgggctcactgtaacctccgcttcccaggttcaagtgattcttctgccgcagcctcccatgtagagtagctgggattacaggcacccgccaccatgcctggctaattcttgcatttttagtagagatggggtttcacagtgttggccaggctggtctcaaacttctgacctcaagtcatctgcctgccttggccctgccaaagtgctgggattatagatgtgagccaccgcgcctggcctacagtttattctttggtggctcacacctgtaatctcagcactttgggaggccaaggtgggagaatggcttgagcccaggagttcaagtccagcctgggcaacatagcaagaccctatctctactacaaaataaataataaataaactaattttttttcttttaaaacccaactattcaacatggcaatgcaatatattaaaaaaattttttttttctttgaaacggagtctctcactgtcacccgggctggagtgcagtgtcgccatcttggctcactgcaacctccgcctcccaggtccaagtgattctcctgcttcagcctcccgagtagctgggattacaggcacccaccaccatacccagctaatatttttgtatttttagtagagatggggtttcactatgttgggcaggctggtctggaactcctgacctcgtgatctgcccgaggatcggcggcctcccaaagtgctggggattgcaggcatgagccaccgtgcccagccaaaacttttttatttttatttttttgggacacggtctcactgtgtaccccagactggagtgatagagtgctgtcatggctcactgcagcctcaacctccctgggctcaggtgatcttcctgcttcagtctcccaggtagctgggactacaggcatgagccaccacacccagctaatttttgaatttttttgtagagacagggtttcaccttgtggcccagacttgtctctaactccagggctcaagcgatctgcccaccttggcctcccaaagtgctgagattaatgcaatttaaaaaattttttggccaggcctggtggctcatgcctgtattcacaacaccttgggaggcaaaggtgggcagatcacttgaggtcaggagttcgagactagcctggccaacatggtgaaaccccctgtctactaaaaaaatacaaaaattacctgggcacagtggtgggtgcctgtaatcccagctacttgggatgctgagggtggagaattgcttgaacctgggaggcagaagttgcagtaagccaagatcatgccactggactccagcctcagtgacagagcaaaactctgtctccaaaaaaattgttttttttttttttttttcaaatcatcacactacagccaaggcctggccacttacttttgtaaataaagttttattggagccagtggaccagtgaggccgaatcttgcaggtgtaagatcacagtctatccttgaaaattttgatattttgttcattgggtggtttttcattaatttaaattttaaaaaataacatattaaaggctggtgtggaggtgcacgcctgcagtcctagctactcccagaggctgaggcgggagacttgcttgagcccaagagttgaagtccagcctgggcaacatagcgagacccccatctctaaaaataaaaataatgcattagaatattattggattcctgggcagggcacagtggctcacacctgtaatcccagcactttgggaggctgaggtgggtggatcacctgaggtcaggagtttgagaccagcctggccaacatggtgaaaccccgtctctactaaaaatacaaaaattagccaggcgtggtggcaggtgcctgtaatcccagctactcgggaggctgaagcacgagaatcgcttgaatccaggaggcggaggttgcagtgagctgagattgcgccattgcactccagcctggaggacaagagtgaaactccattcccctctgcaaagaaaaggaatattatcagattcctaagctttttggctccccctttagtttgggggctggggtggtgagtgtctgacctggcctcactgtcctccctggatgtgatgagacccaggtgtgggtcaggatgtcattcgtttgtccaccagagggcgcccaaactgctttgagctgctgggaaatggtgctcctagacttttagcaaacaaacaaaaaaaaatggcacatcggcaaatttcagaccattctttttttttttttttttggttccagagtagctgaaatctttgttcagttacaagcaggataaaatggaaactgcctgggagaggctgagaaaccttcttgcttgggggaggtggggcactgctagaattaatcgcttcacagaccagcccatccaggactcctcaaatttggcaaaaaagccattcattcattcattcatttatgtagagacgagggggatctggctatattgcctagattggtctcaaattcctggcctcaagtgatcctcctgccttggtctactaatgtgctgcgattacaggcatgagccaccgtgcctagctctagtggacttgaaatgttgccttgcccagggcccttatgttgaatggcccaggtccacttgtatggttctgtaccaaggttaaccccatcccataatgcctgggacagttgatgcaggacaatcagcttctgtgccattcaacctcaggactgagcatgctgggcattgtggggtccgaaggtggctcccctgtccccttcaaaataccctctttttcttttcttcttttttttttttttttttttttgagacgaagtcttgctctgttgccccagctagagtgcagtggtgcgatctcagctccccgcaacctctgcttcccgggttcaggcgattctcctgcctcagcctcctgagtagctgggattacaggtgcccaccgccacagctggctaatttttgtatttttagtagagacagggtttcaccgtgttggccaggctggtcttgaactcctgacctcaggcaacctgcccacctcagcctcccaaagtgctgggattacaggtttgagccactgggcctggccttttttttttttttttgagagggagtctcactctgttgcccaggctggagtgcaatggcgcgatcttgactcactgcaactccatttcccgggttcaagtgattctcctccctcagcctcccaagtagctgggattacaggtgcatgccaccacggccagctaattttgtatttttagtagagacagggtttcactatgttgatcatgctggtctcaaactcctgaccttaggtgatctgcccgccttagcctcccaaagtgttgggattacaggtgtgagccaccgcgcccagaccaaaatatgctcattttaataaaatgcacaagtaggttgacaagaatttcacctgcaaccttgtcaaccacctagaataaaagcctctgcagccctcccctaaagactcatcaatgtgaggctcaagaaccttcttaggctgggctcggtggctcatttctgtaatccctgcactttggaaggctgaggcaggaggatctcttgaggccaggagttcaagacaagcctgggcaacatagccagacctctgtttctatcccccacaaaaagaaccttcttaaaccggaattgagtcctacaacctcgataactcacaaataagcccgtgtggcctctcacagacttgggaagttctccaagtgtccagggagatgtgccaggcgctttcctgccgtgaccaccgtcctctgcctgctccatttcttggtggccttcctttagacctgggcctcactcttgcttctctcctgcagctctgggcgacgttgctggcagaggaaatgagaagaagcccagtagcgtgagggctctgtccattgtcctccccatcggtaagcgcgggccggtcccccagcgtcccccaggtcacagcctcccgctatgtgacctcgtgcctggctggttgggcctgttcactttttctcctggacagggaacagccccactggtgtcctttatcacccccacggcctctcctggcttggggctgacagtgacaagatcagacagctaaggggtcagatggaggatgtggagctgggtcccgtgctgtggaatagcctcaccgagatttgagtgccttctggggaactggttcccttgcagggggctgtgtggagaggcgcgctctccctgcctcacccatgctcatcctaactcggttaccatcacatctcttttttctttttttcttaaattttaagaaaaaagaaatttaatttttttgagagacagagtcttgctctgtcacccaggctggagtgcagtggcaccatcatgcctcgctgcagcctcaatgtctgggctcaagcgatcctcccacctcagcctcctgagtagctggtgcaagccactataccccacttcctatttcttaaaaagtcacagccctgtgtgtggctaatcctggacagaaatctagaagaagtcagctacttctggggcgtggctcacccagtgggcttcaggttagatatttcttatacttatgaggctgggtgtggtggcttatgcctgtaatcccagcactttgggaggctgaagtgggtggattgcttgggctcaggagttcgagaccaacctgggcaacatggcgaaaccctgtttctagaaaaggtacaaaaattagctgggcaggtggcacgtgcctgtggtaccagctacttgagggcctgaggcaggaggatcgcttgaacctgggaggtcgaggttgcagtgaactgagatcatgtcactgcactccagcctggtgacagagcaagaccccgtctcaaaaaaaaaaaaagaaagaaaaaaattcttatgcatagatttgcctcttttctgtttgtttgttttgagatggagtctcgctctgtcgcccaggctggagtacagtggctcaacctcggctcactgcaacctctgcctcccgggttcaagcaattctcctgcctcagcctcctgagtagctgggactacaggcgcccgccaccatgcccagctaatttttgtatttttagtagagactgactgggtttcatcatgttggccaggctggtctcgaactcttgacctcatgatccgcccgcctcagcctcccaaaatgctgggattacaggcgtgagccaccaggcccaggccgcaaggcgatctctaaacaaacataaaagaccaggagtcaaggttatggtacgatgcccgtgttttcactccagccacggagctgggtctctggtctcgggggcagctgtgtgacagagcgtgcctctccctacagtgctcctcgtcttcctttgcctgggggtcttccttctatggaagaactggcggcttaagaacatcaacagcatcaactttgacaaccccgtctatcagaagaccacagaggatgaggtccacatttgccacaaccaggacggctacagctacccctcggtgagtgaccctctctagaaagccagagcccatggcggccccctcccagctggaggcatatgatcctcaagggaccaggccgaggcttccccagccctccagatcgaggacagcattaggtgaatgcttctgtgcgctcattcagaatgtcagcggacaatggccttggtggtgtagaggaatgttggataagcaaatagagagctccatcagatggtgacagggcaaagaaagtcaaaaggagttcagaggccgggcgcggtggctcatgcctgtaatcccaggactttgggaggccgaggctggcggatcacctgaagtcaggagtttgagaccagcttggccatcatgacaaaaccccgtctctattaaaaatacaaaaaattagccaggcgtgggagtgggcgcctgtaatcccagctactcgggaggccgaggtagaaaaatcgcttgaacctaggaggcagaggttgcagtgagccgagatcgcgccactgcattccagcccgggaggcaagagcaaaactccatctcaaaaaaaaaaaaaaaaggagttcagaggcccggcatggtggttcacacatgtgatcccagaacttggggaggttgaggcaggagaatcacctgagctcagagttcaagaccagcctgggcagcacagcaagaccccatctctgcaaaaaataaaaatttagcccagtgtggtgatgagcgcctagttccagctactagggaggctaaggcaggaggattgcttgaggctaaggtaggagattgagactgcagtgacttgtgattgcgtcactgcgctccagcctgggtgacagagcaagcccttgtctcttaaaaaaaaaaaaaaattcaaagaagggtttccagagggccaggagggaggaagggagaggaggtgttttatttttttgcttttattttttattttgagacagagtctctctctgtcacccaggttggagtgcagtgctgtgatcttggctcactgcaacttctgcctcctgggttcaagcaattcttatgcctcagcctcagcctcctgagtagctgggattacaacactatgcccgggtaatttttgtatttttagtagagacgaggtttcgccatgttgcccagactggtctcgaactcctgacctcaagtgatccacccgccttggcctccccacgtgctgggattgcaggcgtgagccactgcgcccgccttgatctttacacaaggggtttagggtaggtagccttctctgaaccaggagaacagcctgtgcgaaggccctgaggctggaccgtgcctgttgggtttgaggccgttgtagctggagcaaacagagagaggggtaaaaaggcaggaggctaccaggcaggttgtgcagagccttgtgggccactggggaggactttggcttttgccctgagagcggtgggaagtgactgaatccggtactcaccgtctccctctggcggctcctgggggaacatgcttggggatcaggctgggggaggctgccaggcccaggaggtgagaagtaggtggcctccagccgtgtttcctgaatgctggactgatagtttccgctgtttaccatttgttggcagagacagatggtcagtctggaggatgacgtggcgtgaacatctgcctggagtcccgtccctgcccagaacccttcctgagacctcgccggccttgttttattcaaagacagagaagaccaaagcattgcctgccagagctttgttttatatatttattcatctgggaggcagaacaggcttcggacagtgcccatgcaatggcttgggttgggattttggtttcttcctttcctcgtgaaggataagagaaacaggcccggggggaccaggatgacacctccatttctctccaggaagttttgagtttctctccaccgtgacacaatcctcaaacatggaagatgaaaggggaggggatgtcaggcccagagaagcaagtggctttcaacacacaacagcagatggcaccaacgggaccccctggccctgcctcatccaccaatctctaagccaaacccctaaactcaggagtcaacgtgtttacctcttctatgcaagccttgctagacagccaggttagcctttgccctgtcacccccgaatcatgacccacccagtgtctttcgaggtgggtttgtaccttccttaagccaggaaagggattcatggcgtcggaaatgatctggctgaatccgtggtggcaccgagaccaaactcattcaccaaatgatgccacttcccagaggcagagcctgagtcactggtcacccttaatatttattaagtgcctgagacacccggttaccttggccgtgaggacacgtggcctgcacccaggtgtggctgtcaggacaccagcctggtgcccatcctcccgacccctacccacttccattcccgtggtctccttgcactttctcagttcagagttgtacactgtgtacatttggcatttgtgttattattttgcactgttttctgtcgtgtgtgttgggatgggatcccaggccagggaaagcccgtgtcaatgaatgccggggacagagaggggcaggttgaccgggacttcaaagccgtgatcgtgaatatcgagaactgccattgtcgtctttatgtccgcccacctagtgcttccacttctatgcaaatgcctccaagccattcacttccccaatcttgtcgttgatgggtatgtgtttaaaacatgcacggtgaggccgggcgcagtggctcacgcctgtaatcccagcactttgggaggccgaggcgggtggatcatgaggtcaggagatcgagaccatcctggctaacacgtgaaaccccgtctctactaaaaatacaaaaaattagccgggcgtggtggcgggcacctgtagtcccagctactcgggaggctgaggcaggagaatggtgtgaacccgggaagcggagcttgcagtgagccgagattgcgccactgcagtccgcagtctggcctgggcgacagagcgagactccgtctcaaaaaaaaaaaacaaaaaaaaaccatgcatggtgcatcagcagcccatggcctctggccaggcatggcgaggctgaggtgggaggatggtttgagctcaggcatttgaggctgtcgtgagctatgattatgccactgctttccagcctgggcaacatagtaagaccccatctcttaaaaaatgaatttggccagacacaggtgcctcacgcctgtaatcccagcactttgggaggctgagctggatcacttgagttcaggagttggagaccaggcctgagcaacaaagcgagatcccatctctacaaaaaccaaaaagttaaaaatcagctgggtacggtggcacgtgcctgtgatcccagctacttgggaggctgaggcaggaggatcgcctgagcccaggaggtggaggttgcagtgagccatgatcgagccactgcactccagcctgggcaacagatgaagaccctatttcagaaatacaactataaaaaaataaataaatcctccagtctggatcgtttgacgggacttcaggttctttctgaaatcgccgtgttactgttgcactgatgtccggagagacagtgacagcctccgtcagactcccgcgtgaagatgtcacaagggattggcaattgtccccagggacaaaacactgtgtcccccccagtgcagggaaccgtgataagcctttctggtttcggagcacgtaaatgcgtccctgtacagatagtggggattttttgttatgtttgcactttgtatattggttgaaactgttatcacttatatatatatatatacacacatatatataaaatctatttatttttgcaaaccctggttgctgtatttgttcagtgactattctcggggccctgtgtagggggttattgcctctgaaatgcctcttctttatgtacaaagattatttgcacgaactggactgtgtgcaacgctttttgggagaatgatgtccccgttgtatgtatgagtggcttctgggagatgggtgtcactttttaaaccactgtatagaaggtttttgtagcctgaatgtcttactgtgatcaattaaatttcttaaatgaaccaa

SEQ ID NO: 22 - DNA, 21297 bp, Homo sapiens
  source 1..21297: mol_type = genomic DNA; note = MYBPC3_gene
agtccctctttgggtgacctgtgcctgcttcgtgcctggtgtgacgtctctcaggatgcctgagccggggaagaagccaggtagctttaggactggggttgggtctaagtgtgggagcaggggggtgtctacaattggggagcagggctaggagggagttcttgagggggttgacgaggacgtggcctctgagccccaggacaggggcagccagtcctccagggtccttttttgattctcggtttctttttcccatccctctgatgagaggtgaaggtaaacccaaggtcagggacgcagagaggggacacagccaagacaggaagcacccggggtcaacccattctgagaatgcaaagggaccccttccctgtcccattgccttcaccttccacagcaaggttccccgcggacagagcccacgtttagtatggagctgagccaggctcacggcatgccttcagaccagtctctacccactatgggtctcagtctcccaacctggggtgccgggggtggtggtggcattgggttggttcctcctggctgtgacattatctgcttcatgagcctgtacggtgtggcccccatgttgagggtgacacagcccctcttctctgagagaggacagtcaggagcccctgaacccaggccaagggcagggaaaatcacagcccagggacctgggcctgggctgtgcccttatgaaggttgtccagggcagagatccaggtccccatcccccagcgccctcccaggccagctttatctcagttgctgatacccagcctgaggtccttggaggacaaatttggccacattccaagtaggcagacttccccgccccctgccaagggcccgaaatggttgggggaaagggagctgggttcatcacgggtgtctccaagcagggaaagtggacacatgcagaaaaagtcttgttgggaggtcaggaccacagccctggctctcccgactgctagctgtgtgatcttggaggagccgcttagcttctctgagcctcagtgtcctcctctgagaaatgaacagaataactgcaactacctcagagaactggtagagtattacgtgaggggatgcatagaaagtgctagcacagtatttactgagaggggctgcaggggcggggtgcacgctccaaccaggggccgctgtagcctccacctggcccttcagtctcagcttttagcaagaagccacggtcagtggaagtggccgcaggcagccctgccgtgttcgaggccgagacagagcgggcaggagtgaaggtgcgctggcagcgcggaggcagtgacatcagcgccagcaacaagtacggcctggccacagagggcacacggcatacgctgacagtgcgggaagtgggccctgccgaccagggatcttacgcagtcattgctggctcctccaaggtcaagttcgacctcaaggtcatagaggcaggtaagatcctgatcagccttccctgaggtttgggctgctgggggaggggcagcccagcgactctccatccatccagggaacaggaggtgctttcacactttcttgcctttgctgtggctgtgccccccgccaggaacgccctttcccccttttctgcacatgacctctctgagtacccccatgtgccatcctggcttgttccagccatggggtaggtgggagagatgaacaagacacaaccccactctccccctgcagacctccctggggagatgaccctgcacagacggccgggaagccccaggagctgtggatgaggggagtgcagcccagtctgaggggctgctctaaggctggggcagagcagggatggacctggagctgttcagggcagatgcagaggacatgggaactgatggcctgggacggggaggagaatgtgagaggcaggctggctctccagctcagcatgagctgcctctgaggggcccaggcagcgggaggacagccatggcagactttcctcatccacagcgggctcatgggtccaatgctcaggagagagagggtggaggggtctctggttagtggctgcaccacgactcccatctgatcccctccagagaaggcagagcccatgctggcccctgcccctgcccctgctgaggccactggagcccctggagaagccccggccccagccgctgagctgggagaaagtgccccaagtcccaaaggtgagaggggctgggcagggaggggcaggatccgtgggtagggcgtgtccagggcaggtctcaaaagcctttgctgggccaggtgcggtggctcaggcctataatccccagtactttgggaggccgaggtgggcggatcatgaggtcaggagattgagaccatcctggctaacatgatgaaaccccatctctactaaaaatacaaaaaaattagccgggcgtggtggcgggcacctgcggtcccagctaacttgggaggctgaggcaggagaatggtgtgaacctgggaggcggagcttgcagtgagccgagattgtgcctctgcactccagcctgggtgacagagcaagactccatctcaaacaaacagaaaaagcctttgctcacagggtcaagctcagcagctctcaatggtcctacccctggagcccccgatgaccccattggcctcttcgtgatgcggccacaggatggcgaggtgaccgtgggtgagtgtgagctgctgtgcccagcattggggtgggaagggggggcagcaggacactccccaagccgggcctgtcgcccctgcctttgcaggtggcagcatcaccttctcagcccgcgtggccggcgccagcctcctgaagccgcctgtggtcaagtggttcaagggcaaatgggtggacctgagcagcaaggtgggccagcacctgcagctgcacgacagctacgaccgcgccagcaaggtgggtccaccggggtcgtggagacacggagagaggggacatggagagccctagaaggcacaaggcacacagagggcaccatgagacccagaggcacacacgagctgcaagcaaggggtgtggggaatctgggaggcaggtggaggggccaggggcccacagggagatcccggaggcctgggggccagggagtgcgatgaggctcatgggagcactgtcggggacctgggagacttggtggacatgatcacctcaagggggcacctaataaggtttggccgggggtggggggtcgcccagggtggtcaggaagcctggaggacactgtgaagcatgggggcaccagctagtggggttgtaaagcccctggatgggtgagtatcagggctaagggctcaagggactctcagggattaaccagaacaattcctcattatacagacacggaaaccaaagcttgagaggttaagtggctgctccaaggtcacttagacataggcctagaaccttaagccttcgttttttgtgttttgtttttttccgccctgcccaccagaaccttaaggcttaagtccccttgtttgttcactccaagcctctgcttttcccaaccttccccagtcctgggctaggcaagggggcctctagcaagagaggccaacatgttctgctgtgcggggctgtgcattgcacaaaagcctgtatttcaccacaaccatgtgccagcagatggcaatcatgggtttcgagatagtcccctttctctgtacaaaaactctgtatgggttaactaaagcctgagggtgcgaagatcgatgagcatttgtcactcccagcctcctttaaatatatatatatatatataatttgagacagggtctcgctctgtcgctcaggctggagtgcagtggctcaatctcggctcactgcaacctccacctcctgggttcaagcgattctcccacctcagcctcccgagtagctgaaactagaggtgtgcaccaccatacttggctaattttcgttatttttagtagagacggaatttcaccacgttggccaggctggtctggagctcctggtcttatgtgatccgcccgcctcagcctcccaaagtggggattacaggcctgagccaccgcgcccggccactcccagtctcctttaagggtgcggagccttgtctcccggcccctggtgtcccctgacgccccgtccctccatgcacacaggtctatctgttcgagctgcacatcaccgatgcccagcctgccttcactggcagctaccgctgtgaggtgtccaccaaggacaaatttgactgctccaacttcaatctcactgtccacggtgagggggccctggtgtctgtcctgggctcgggctccccatgggtcctggtctcctacctccttttcccaacactaaggaggatgcctcgtcccatccagacatgagtgctggccacgtgcccagtgctgcacacacagggtgtgagagaaaccccaaggcttgcagggtaggcgtgggggcttagggctgagtccgggtctcatctgggtgggactctgttttatcatcttggtgtcacggctcctggcccatggcctggcactgtctgaatgtttgggcgatgggtgaaggtgagttgagagatgggtgggaattggggacaataaaccgtcccacctgcctggtaccttgaccctgggaaaggctgggaaggtgagatcctggggcagatgcccagcctcatggggtcatgaatgggcaagtctgtgaatactcagaggccgcccccagggcagggcttctcaaacggccccctctgaagccccttcccccatctctccaccctttgaacccagaggccatgggcaccggagacctggacctcctatcagccttccgccgcacgtgagtggccatcctcagggcctgggggaggccagtgctggagtctgaggcccttcagggtctcgactgggggtcagggctggggatgatttgcggggcggagctgaagtcagtgggggctgcaggggagagcaagcttcccaggcaggtgaggatactgagtctaacccccacaggagcctggctggaggtggtcggcggatcaggtacccctgccccaggccctacctgcaccatccgcagacccccaggggtctgagacgggtgggagcccaatctggctagtgtccctttctccctccccactccactcccatcctgctcctaatccctttccagtccctcactgcagcctcactgggggtccctctccatagtgatagccatgaggacactgggattctggacttcagctcactgctgaaaaagaggtgagtcctgggtggcagttcctggggcagctggtgaggcctggctccaaatcccagcactgtggtttgccagctgtgtgaccctgagcacaacactgcacctctctgagttggtttccttgtctgtcgaggggatgatcccagtgtggaaggagttaaagggctctgcagacattatgtcccgtcaacagtcatcctcacagtgtcccccacggccactccacacttgaggctgcaaaagctccctccgtaaactccggggacccagaaggaacagagagagggtccccagagctgcagggtctaccaggtcggcccaactgacttatgttctctctgccctctctctccctctcccccggcccctccattatggctgctgctgctgtggcccagagagtaagaatcggggtctgggtgtttgggggcggcagggcgctggtgggtgcagaggggattcccgtcccctctctgagaggctgtggtgagagactcagagcagggtgcggctccccacggacaggggtgagtctctgtgccttgggcttctcctgccacccacctatctgtcagagcttaggagggataagaaaaagtaatgcacacaggaggtcctgccagagcctccggagcagcatgggtgccccacaacacagggagtgcaagtgcggaaaatagggaggaagtaaaggcccatgggtggggtccaggtctttgagggaaggtggccatacctctcatgtgccacctaccctttctcccacccccacccctggagcagcagtttccggaccccgaggtgagtgcccaacatagcacagcaccctcatcacccctaattctgccaggagcccctccagatccccagcccctcttcagctcccttggcccccagtcctgcctggcctgggacccagagcagctccagctgccccaccagaagggaaggggcagagggacaggggtggctacagctccttggtcctgggcccaggaagccccgcccagggggctgcagtcttgcccccggccacagcctagactgcgggacacagggactcgaagctggaggcaccagcagaggaggacgtgtgggagatcctacggcaggcacccccatctgagtacgagcgcatcgccttccagtacggcgtcactgacctgcgcggcatgctaaagaggctcaagggcatgaggcgcgatgagaagaagagcacaggttagcccttcctcagaggggagaggagagggcacaggctagcccttccctacacaggagaggagagggcataggttagcccttccccacaggggagaggagagggcacaggttagccccccacctcgtccacatacatggaaagagcggagtccggcttagcacagagactcacaggaaagaagagcccaggttaacccctccttgtgtagaaaaagccaagaatgcccaggttagccccttaccacagagatagaagagaagagcaaaagttaggccaggacagccacaaggaaaaggacagagctcaggttaaccctcctcaccaaggaaaaatcaggctacactttctttctctaccctcttctgaaaagaaatgaagcccggttaaccctctccacacccaaaagaaaagggaagaggcccgctaagcctggagagccacacacaggcaaagaaaagagcctggctaatctttctctcaggcaaacaaagcaggagggcttgggttaactaccctcacccccaggcagatggaaagaggagagcccaggaatagcccttctccactgaggggttgacaagggcgggtgtgagccgggaaagcaggggtctcacatgccttctccccaccatgtctgggtctagcacagggcctggcacacacctcgagcgctctataaacaccgactgaatggaggggtcagcttccatgcaggatatgggagacaagcccctcccaaagcacacacacaaaacacacacgatcatggggacggggagaggagctggttagtccctccctgctgacctcccccaggccccttatccctctgccctgcctccctgttgtctcagcctcactgggtttcccatcaccccatcgctaggtggcctggcccttaccggcaccgtggccccatttaagccagggatcccctgaatgccaccaatgttcctctgggttaactcctgaactgctgagcccagagggcaccaagcaaaggactgtaggtgcccaaggaggaaaagatggaggctggcaaggcagatggggacctccgagggtaggggtgtcttccaggaatagcaacaacagtaaaaagagcaaattgctggccaggtgcagtggctcacgcctgtaatcccagcactttgggaggccgaggcaggtggatcacctgaggttaggcgttcaagaccagcctgaccaacatggtgaaaccccgtctctactaaaaatacaaaattacctgggcatggtggcaggcgcctgtaatcccagctactccggaggctgaggcaggagaatcacttgaacccgggaggcagaggttgcagtgagtcaggattgtgccattgcactccaacctgggtgacagaatgagactccatctcaaaaaaagtgagtgagttccttcctaagccagccactaggtgctttatgtaattatctcatttaattctcgaaacaacactatgatggaaggactattaccatttccatgttactgaggaaaccgaggcacagagggtttaaggaactagcgcaaggtcacagagcacccagcagtagatctctgcccctccgcagctgactccaggcccagccagagtatttgaggactcaggggtccttctctgctcggtggatggagcccccacttcctccctgggctcagcagcagcaacatgggcttttacaaacacggccgcaagaggaggcattgttgtggagcagggctgggctcaagacccagctctgccacacacctgctgggctggtggcattgggccagtcgcctctctgagccctatttcccccactgcagcagcatggggaccaccgcactggccctgggggctgagatgggagtgagagtgctgggcacagagggctgctaggtgggagcgcctgggaagagtacacaactcaggggttgctgagagaagagaaggcacagctgtcccagccccagttctcctgacaagcttctgtctttctggaagcccctaacccaatccctgagctgagcaggtggagaggaccccaaggaagacagaaggacaaggtcagacagacagagacaaggaggtgggttgacacatagacacagataaagaaatgaagacaccatgcctgtaatcccagcactttgggaggctgaggcgggcgcatcacctgaggtcaggatttcaagaccagcccggccaacatggtaaaaccccgtctctactaaaaatacaaaaattagctgggcgtggtggcacatgcctgtaatcccagctactcgggaggccgaggcaggagaatcacttgaacctgggaggcagaggttgcagtgagccaagatggcgccattgcactccagcctggccaacagagcaagactctgtccaaaaaacaaacaaacagacaaacaaacaaaacaaaaagaaatagagacacagagaagtggaagcggggcggcacagaggggattggagggggggacctgggccccagccacagccacagtagcttggcctgggggagcagggtgcgggcggtggggtggccggggctgaggggtggtgctcagcctttcagaagaagctggagccggcctaccaggtgagcaaaggccacaagatccggctgaccgtggaactggctgaccatgacgctgaggtcaaatggctcaagaatggccaggagatccagatgagcggcaggtgcagcctggggtggggaggggggctcgggtggaggtggggacccccatagccttgcctcctgcccctctccacatgcgtatctctgactcggtgtggctctcagccccatctctctgggcctaatttcccatccttttgctcctgccggtccctctctctctctccttttgtctcgggctcacttcctcccgtcgggaacacttcaacggccccttctgttctacagcaagtaagttcccctctggatggcttggggtggggggcacagggattatcatggggcgcactgggcccggaggggtgtccgcagctttcctgccacttccctgcggcccccacccaggtacatctttgagtccatcggtgccaagcgtaccctgaccatcagccagtgctcattggcggacgacgcagcctaccagtgcgtggtgggtggcgagaagtgtagcacggagctctttgtgaaaggtgggcctgggacctgaggatgtgggaacctggggaggagatggcctcaggggagccaaccctcatgctcaccctgcctggacagagccccctgtgctcatcacgcgccccttggaggaccagctggtgatggtggggcagcgggtggagtttgagtgtgaagtatcggaggagggggcgcaagtcaaatggtgagttccagaagcacggggcatgggtgttgggggcatctgcccagaagaggccacagcacttgccacccacccacccggctaggctgaaggacggggtggagctgacccgggaggagaccttcaaataccggttcaagaaggacgggcagagacaccacctgatcatcaacgaggccatgctggaggacgcggggcactatgcactgtgcactagcgggggccaggcgctggctgagctcattgtgcagggtgagcctggctgggggggcacatgaggctttagggcttggacccctcagcccccaccccacctagccctgtaggggagcaggcaaacctgggctcaaggcctctgtgaccttgggcctttgacagcctaaacctcatccttctcatctctaaaatgacgatgctgaggtgaccgctccagagggtactgagagggtcatacgggcctggtgagcatcaccacccctcagacacttgaggttccttatgtgcactgcaccatcacaggcaaacatggcacacacaggcacacgtgttttcacatgcccacatgcacccagacacgtgcgcaccagcgcccatgggcccacacgccctccacagggattcacgccacacccacacaccctcccgagctcaatggctctgccctgccctgcagaaaagaagctggaggtgtaccagagcatcgcagacctgatggtgggcgcaaaggaccaggcggtgttcaaatgtgaggtctcagatgagaatgttcggggtgtgtggctgaagaatgggaaggagctggtgcccgacagccgcataaaggtgtcccacatcgggcggtgagtgtgcagggcaggtggatgggacaggtggagactgagatggagacagagagagacacagggagaaacagagagagagagataaagacaggtggacagagaggcagatgcacagagacaggacagagactgagacagagacccacagagagggagaaacagacagacccaaaaagacaaagagacagaaagacagaaatagttctatagagacagaaagatatgcacagggaggcacacacataggagagttcgtcagagacagagaagaacagagggacagagacaaagaggcagcagggagagacacggacggggtcgagcgctccccagcaccctcccccagcttgtgaccagggcagggcaggaggccaccaaggaggccggctctggccagaggccctcactgcctctcccgccctcttgctcatccctggagcaactgggctggccgtgctgggcccaagttcacagagattaatgagacccagcccctgcccagtctccaagggcccagccaaggagatgctttgatgtagaaatcacttttacgctgcctacctctgaaggcacattaaaaagctggaaaattagataatatagaaaaaaaaaggcatttttaaaaatcagaataccaacaagccaggacaaggtgagggcctcctgggaccctggctggggtatctggcaaggccaggggtgtgtggcccagtggggtcccctgagccactgctcccctgcagggtccacaaactgaccattgacgacgtcacacctgccgacgaggctgactacagctttgtgcccgagggcttcgcctgcaacctgtcagccaagctccacttcatgggtgagcctgctccagggtagggtgggtcggggcagtggggccaggagcccctgtcactgggccctgcctttgcccccgtgctacttgctcttccttctcttgcagaggtcaagattgacttcgtacccaggcagggtaagtcttggggcccctgagtcttggttctgctcactttcccgcaacccacccacgcaggcctcccctccactcacagagggaagagcaaggatcaaaagtgggggtcctggggcccagcttcagctttgccactcatgaccatgggtcaattataatctctgtgagcctcagtttcctcttctctaaaatgggaaccctgatagtgccacctcataggatagttataaagatgaggtgacatgatgtatcagacctgtcaagtgctgtcacatgtgtgactgttattattacatcttttcttcttcttcctttttttttatttttattttttttgagacggagtctccctctgtcgcccacgctggagagaagtggcgcgatctcggctcactgcaagctccgcctcccaggttcacaccactctcctgcctcagcctcctgagtagctgggactacaggcgcccgccaccatgcccagctaattattttttgtatttttagtagagacggggtttcaccatgttagccaggatggtttcgatctcctgatctcatgatctgcctgcctcggcctcccaaagtgctgggattacaggcgtgagccactgcgtccagactgctttgctttgtttaactgagggcagattcctgatttatttggccagggaacctttttaatgtgtgcatgtgtgcgtgcatgtgtgcgcgcgtgtgtgtgtgtgcatgtgtctgtgtgtgtatgtatatatgtgtgtctgtgtctgtgtgtgtgcgtgtatgtatgtgtatttgtgtctgtgtgcatgtgtgtgtctgtgtgtgcatgtgtgtatgtgtatgtgtgtctgtgtgtatgtgtatatgcgtgtgtgtgtgtgtattgtgtgtgtgtgtatgtgtgtggcaagacactgatgttcccccagttttcaaaatgctatgctaggtgacctgacctgaatattacaagcctcccagccaacgtcctggggtgatgggaatgttccagatcttggttggattaataattgcatgggtgtattcatctgtcagaactcagcctactgtcagatctgagcataaactatacctcaatacaaatctaaaaaaccaataaccaggggcccaggctcttgagcagccccgccccagtgacctgtgctcctcctggctctcccgtttctctgaactacattgtgtcttctgcagaacctcccaagatccacctggactgcccaggccgcataccagacaccattgtggttgtagctggaaataagctacgtctggacgtccctatctctggggaccctgctcccactgtgatctggcagaaggctatcacgcaggtactgtgggtccctcctcagtctccccatctataagatgggtgtgtggaaccagccaagtgctaggacctgctgcacaccccacccacatgtgcacgccctgctgttggctaccccatgggagagactggtcagggggcaggcaaggtgggcagtgtgggtcagggggtggaagaagcagcagaggggcgcttccaggctgagtcagctcctctgctccctacttccctcctgccctgttcccaggggaataaggccccagccaggccagccccagatgccccagaggacacaggtgacagcgatgagtgggtgtttgacaagaaggtgagtgagactgaggtcaggaggaggctcgtttgtctttcatcactttctacctacgtggtgccgagcccttggcgaggtctccatggaggtgccacacttggccgggtgtgttgctgcccccagcagggtccctgtggggccctcacacctcaggcagagggtctctgtgaagtgtgctgatggccatcacaaggatgtggacaccctctcattgccaggaagccctcatgactgggctgctccctggctcccttcatcctaagctgaccttgaccttgaccttgtgctccctctcaactcaggagtagtttctgagacacttttctgccagtgtagctgccggggtcttgctcctgcctggcactgttggttcttctgaaggctggggtcttgaggggtcctcatgatagctcatctgagaggacaggtggttgccccaggtcccgtgacaaagctagaacccgagcccctgccctcagtcggtgccacagagatgattttgaactagatgctgacgtggatgcagtcttcccacaggctgtgttccccccatggacccccgggacatctggctgttggcggaggctgcaagggcctctggggtctgacttggatctcaccccaactctgcacccccccagctgctgtgtgagaccgagggccgggtccgcgtggagaccaccaaggaccgcagcatcttcacggtcgagggggcagagaaggaagatgagggcgtctacacggtcacagtgaagaaccctgtgggcgaggaccaggtcaacctcacagtcaaggtcatcggtgaggccggccggggtccaagctggagaacacagaggggcagccccaaggagggcccatccgttcgctcattcagccactcgacaaacatcacgggcatgctccctgagccgagcggcaacaggacaggtttttctgcccaaaaggagccccgctctgggggagatggaggcagatgcatccagcagatttcctgcgacactgctgtacatgagccatgtccagagtgccgtgggagcactgagcagagagccatccctgtgcctgggggtgatgcctttaggaggctgagaagatggtgaggaaaggcatcccaggcagaggaaactgtgtacaaaggggtggaggagggaaagggccttttgggtgtggagaatgaatgaaacatgtcaggagaggactgggtggggttgggaggatcagagccaggacaggggtgaatatgggcagtgagaagccttaaagggttgacggagggctggcgacatgatcagaaatgcatcctgttgagacccagcctggacaacacagtgagactccatatcactaaaaaaaaaaaaaaaaaaaggaaaagaagaaagaaatgcattctagaaagatctctttggatctgggggtggtgggggcagcctgtggcggttagttggagtgggaaggggacgagcaacgttactcaaggccctgagcggggcagggctgatgtgggtccatcccaccccatccagacgtgccagacgcacctgcggcccccaagatcagcaacgtgggagaggactcctgcacagtacagtgggagccgcctgcctacgatggcgggcagcccatcctgggtgagtgcaagggcaccggatggaggtgtgagggcgccaaacagatccgagggaaggtggtgtggggatgcctgggttccagaccagagctgccacctcccctgagccaggctacatcctggagcgcaagaagaagaagagctaccggtggatgcggctgaacttcgacctgattcaggagctgagtcatgaagcgcggcgcatgatcgagggcgtggtgtacgagatgcgcgtctacgcggtcaacgccatcggcatgtccaggcccagccctgcctcccagcccttcatgcctatcggtgagcctgcctggcctggtcctgccccccgccccctccccagttaaaaacctccaataatagcaggtgctctgcaggcagccatgctagacactcacatccacagtctcctttcatcctcgactggggatactcagccgcattttacagatgaggaaacaggctccaagcagttaaatgacctgcttgagatctcccagctggttggggtggagctgactctcacactacgccgacccctagttcacgtttcaagcctctctttccatgtctacaaaatgggaataatgacactgcctatctcagagagctgttaggatgatatgggatgaccaggcaggccatctggcatctaacaggtgctcaataaatgttcattgtcccctgttctccacacccttcaacccagggttttcacctatgggatggggcaagggctgtagttagtggaggggtctcaggggcatctgtctgtggaaagagtcctggaccaagactcagagatggcagaggcagctccatggtccccggggggccaactggagtcatccctccctgaagcctcagcttcctcatctgtataatggggtctgagtgggcagaacaggtgttgagactgtggcagggctcaggaggacacctgttcccactagggtgggtgagtccgggggcagctgcctgtggcaagggcaggccaaggacccctgggcccagggatggggcacagcttgggaagatggcaggaatcggggcctgtggggagaagggtccaggcctctcgttttagggactgattcctggtttgttcagttcttagtcaactcacctaatcatacgtgccaggaaattcccatgttttctgtagttttagttttagttttttttttttttttttttttttgagatggagtctcgctctgtcacccagactggagtgcagtcctggcgcgatctggggtcactgtaaccttcacctcccaggttcaagcaattctcccacctcagccttctgagtagctgggattacaggcatccaccaccatgcccagctaatttttgtatttttgtagagacggagtttcaccatgttggccaggctggtcttgaactcctgacctcaggtgatcctcccacctcggcctcccaaagtgctgggattacaggcgtgagccaccgtgcctggctgctgttgctgtttgtttttaagccaatctacagacatgtcttgtaacagggacaaaatattccttaaagtggccaaaagccagctgaacaggaagtgccccctatgtgaccagtgggcagttcagagtctagggcatggatctccagcttccccaggcttgctcagacccctctctgacctctcctctgcccaggtccccccagcgaacccacccacctggcagtagaggacgtctctgacaccacggtctccctcaagtggcggcccccagagcgcgtgggagcaggaggcctggatggctacagcgtggagtactgcccagagggctgtgagtgtccccgcccccaacccccctccccaaaggaagaacatgctcaccttgccattgagcagattcacctgtagtcaagttttttaggcccacttttgccgaaagttgaggacacccagagaaatatctgtcctgttttcagaagtaaaaaagcttgcctagtgaaaaacaaatgcagagtaaagctgactgtaacacttctttgagcagtgcgaaatcagcaactacattttaaaaacatatttaaggccaggcgcgatggcttacgcctgtaatcccagcactttgggaggccaaggtgggcggatcacctgaggtcgggagttcgagaccagtctgaccaacgtggagaaaccccgtctctactaaaaatacaaaattagccgggtgtggtggtgggcacctgtgatcccagctacgcgggaggctgaggcaggagaatcacttgaactcgggaggcagaagttgcggtgagccaagatcatgccattgcactccagcctgggagacaagagcgaaactccatctcaaaaataaataaacaaataaaaatttaaaaaaacatatttaaatcctggagattcctatcagaggagtgggcagtgggagtggggtgtcagtggtgacacagcctgtggccttgcctccccctccccacccccaggctcagagtgggtggctgccctgcaggggctgacagagcacacatcgatactggtgaaggacctgcccacgggggcccggctgcttttccgagtgcgggcacacaatatggcagggcctggagcccctgttaccaccacggagccggtgacagtgcaggagatcctgcgtgagtgcccctttgtgcagtcacaagacccgccattgacaccccaggcccttggtgtccagtggaggtggggacagttggggaggcccagaatgctctgcccagaacgctgggcagagacaggaggggttggagccatcgtccatgcgctaggcctagggaaaaagtgcagagagggtggccaggcacagtggctcaagcctgtaatcccagcactttaggaggccaaggcaggcagatcacttgaggtcaggagtttgagaccagcctggccaacatagtgaaaccctgtctctactaaaaatacaaaaactagccaggtgtggtggcgcgtgcctgtagtccctcaactacttgggaggctgaggcagaagaatcgcttggacccgggaggtggcagttgcaatgagctgagatcacactattgcactccagtctgggtgacagagtgagacaacgtctcaaaaaaaaaaaaagtgcagaaagggctctcttggtgtatgtcagtcccttagttctggaacagggaaagtaaaagccacagtacccaagctctcttccaggagtgtctcagctccaacaggtaaatattgtctatgtagtcagattggtccctctgggatccacttcccattcctttgttccttgtcccaacaaagggtccatcttttgtaaggattggttctcaaagctggaacgaggcagcaaactcaggtggtaacaacacagggcatagggtgtcaaagcccaggcttacaccctggtctatgacttactagctgtgtgacttcagtcaagttgcttaccctctctgatccctgccttttgaagtggtgaggctcggggaagccagctgggcttgggcagcctggagttgctgtgttagcaggagctaaaggaggcgcagggcccagcaggcagcttttttcttagctgcagctctctgggccttgtctcaagggaggttggagctgtggagcccctcagagctgtggcgggccctcacttagctacccactctatacccacagaacggccacggcttcagctgcccaggcacctgcgccagaccattcagaagaaggtcggggagcctgtgaaccttctcatccctttccaggtgggactggcccccttccctgtcccccaggggagagaggctatagtgtgttgttcccatccagtggactgatgtctcagggctggcctgatctgaggtaccagaggctggggtggcggccggcccttggagtgatccaggttcagggttaagcttttcctcccctcagggcaagccccggcctcaggtgacctggaccaaagaggggcagcccctggcaggcgaggaggtgagcatccgcaacagccccacagacaccatcctgttcatccgggccgctcgccgcgtgcattcaggcacttaccaggtgacggtgcgcattgagaacatggaggacaaggccacgctggtgctgcaggttgttggtgcgtggccaaggcctccttgagcccccttgtttcccttccctgggctgggctgctggggccaagggtggggccaggggacccaacccacagctcacattttccagtccactgccccagcaggcctggccctggttggcaggggtggggtggtccctggagccagtgaccccctgctcactgtcaggaggcgtggtgacccaactgggtctgtctcccgcagacaagccaagtcctccccaggatctccgggtgactgacgcctggggtcttaatgtggctctggagtggaagccaccccaggatgtcggcaacacggagctctgggggtacacagtgcagaaagccgacaagaagaccatggtgagcccagggtctggggtccccacgtgcaccctgcctaggcccggcagacccaggccgcagctacccttcactgtcctcaccgtggacccctcaccctccctctgctgatctgaatccctccatagtaggggtggagatgccaagggcacccaggagaggctctcggcatcaggaagggcctggcccagagatgcctcccctccctccctgcccccaggagtggttcaccgtcttggagcattaccgccgcacccactgcgtggtgccagagctcatcattggcaatggctactacttccgcgtcttcagccagaatatggttggctttagtgacagagcggccaccaccaaggagcccgtctttatccccagaccaggtgctgtaccctcattcttccaaccaggggctggggcagggaggctgtgggaacagggagaggggcctagctttgtgtggccctctcggtaccaagtcctgtcaccaacaggcatcacctatgagccacccaactataaggccctggacttctccgaggccccaagcttcacccagcccctggtgaaccgctcggtcatcgcgggctacactgctatgctctgctgtgctgtccggggtagccccaaggtagggaactttaggcgctggtccaggccgaccaggaggcagggctcacaggccccgacgttgagcagtcctctccccagcctgtctcccctgctttctctccaccttggggtgtatggaccgggttcctccccctgggcagggccatggtactcactcttggttccatgtttgtttccagccttgggcatagtcagggactctcgtgggaccccccgagtagaaacacagatgtgtctccctgggtccctgccaggtcccctctcagcctggatggcttccctccctctctttaccttatttatagcccaagatttcctggttcaagaatggcctggacctgggagaagacgcccgcttccgcatgttcagcaagcagggagtgttgactctggagattagaaagccctgcccctttgacgggggcatctatgtctgcagggccaccaacttacagggcgaggcacggtgtgagtgccgcctggaggtgcgaggtgaggagccctcggggccagggcctgggagatgggaagagcgggcggcagtggggaccctgggctttgctccgttgtcctcggccaagcacctgccctggctgcaagggcacggaccctgccacgcccagatgggcaatagcttccagaaggctgggaggacacagtgacatggcctcctcttctgcagtgcctcagtgaccaggctggctcctggggatggccaggtatgtaccacccgacacccagggcacaagtcagtggctgagccctggcccttggtcctggggcagccatcagtaaatgggaggctgtaggggccctccattcactcgtaagataacctgtgttgcaggtacaaccggatgccagccccgtgccaggagcctggagggaagttggggaaacccctccctactgttggatgtatgtgtgacaagtgtgtctcctgtgctgcgatgggggatcagcagggcagttgtcgggcagtcctgagtgggtgttgcacagactggtccacagggctcctgaaggaagcccctggatctttggggtaaaaggagggtggcctcaagaaacaatgtctggggacaggcctttctggcctgctatgtcttcccaatgtttattgggcaataaaagataagtgcagtcacagagaactca

SEQ ID NO: 23 - DNA, 472317 bp, Homo sapiens
  source 1..472317: mol_type = genomic DNA; note = PKHD1_gene
gggacacaaacgagttaggtgagttatagtctaacgtgagtgagttacctgcgtggtggctgcaggctgagctctaaccagataacatgtccacggattcttgacagagagaaataagatcacttagaaagaaaggatcatttctcccttgagtcacaaggagacagaaacagaaaaaaaaggtactgtttgatccagaaaagtctctgctctctgttttctaggtgttgtatctcttgttaacgttctggtgaacaaaaggaagaaatgggagatctatagtagtgccttgcaactttgtccctcgatgtcccaaaggagaagctgagagggaagggaggaagaagggaagagggagtgagagcagagagaggagagagagagaggagaacaaaaacatgactaaataaatgcacacagctctcctctgtggttgaaaaattttagttatgagaaataaagagagtctgagtttatttttaggaagaattagtggatagactaataaaaaattacatttataattgacatgaaaaagatgcagttccaaatgtagggttttaagaaaaccagtgtgcgaatgtttatttctattgttctgagcttgggagtaggcattaagaagaaatgttaaaatcacgtagccagattgaaaatagactctcctgtgctgagtatattttgtctgtgtaacaagcaagtcagatctcatgcttttggactaagcagcaaatacgcttgggtacttttccctatgtggtagatgtattctgaaagttgtatatttataagttgaattctatttcaaatagacgtaaaagtttgggaattttgcaacgaaaaggaacacttgctgaatccacttgaaaatactagaattcctttcttaaatccaagtagcctccacacttaccctatctggtaatgactcgggggcaggtacatagattgtttgttttcccaacttttagtatagtgcttagcacgtagtgggcatacaataaatgtttgcagtgttgaattaaatagaaatgattatagatttccagctgtctcaatcagaacatgcccgtaaggtgagtttattgcaaagtttttgcagattttttttttgagggggggagtatattgtagcttttatattttcagaaatgatgtaactacttctgctaatctcagtgttttcttaaaaatataaattaaatggccaggtgtggtggttcatgcctgtaatcccagcactttgggaggctgaggcagggagatcacttgaggccaggagttcaagaccagtctggctatcatggtgaaaacctgtctctacaaaaaattcaaaaattagccgggtgtggtggcgcacacctgtaatcccagctactcaggaggctgaggcataagaatcacttgaacctgggagatggaggttgcagtgaactgacatcatgccactgcactccagcccaaatgacagaatgagaccctgccacacacacacacatacacacacactttgtgtgtgtgtatgtgtgtgtgtgtatgtaggtatgtatatatatattaaatatatttatatatttatatgtaataaacataaacataattaaatatatattaaacgtgtatttagtagtacatgtgggtgtttaattctgtaattttcaaactttcagaaaatttcagaggcactatttttaagaggattttgtcgatgccctctgccatgaggtgctggagagcagctcagcactttccttagagcaggcatgagagtgaaagctgttcatctcagattaggtaaacccagatttagggtattcaaatatgtcttcatccactccaatgtactgagcgctgtgtgggaccttcacactttcacactaggaaggctgtggaaatagaagactggttcctgggtctcttcaaggaacgtgccgtctggaagaagaggcctatgtgtgccacattatctggtctaggctctacagcacggaagttagaggttcagggggaaggtggtgagcactggaatggcggaggaaagaatcagctgaggaggggctcctgagcagcaccacgaaggtgcgccaggatctcctgaggccacggagagagttgagggcatccaggaagggaccagcaggggccaaggcagaggctgatgtgtggaaggcttgtctgagtgacggtgagaacggcgtgtggctgcagtgtagggttcaaactggagagcagcacgagggaaagctggacgccagcacagggcaaagcaaaacagacttcaccctatcacgaactagaattttaatttctagaattctttttaaaactcagcttctgttcaataatgagttaatgaaagaggttattatttatccagcttaaaataagttggtgggacaaggagggcagagtggggatgattttatgcaaggttctcagatgatccttttctcctgagcttggaaaaatggtggctccatttgaagacactaaggccatgtttatctcatctccttaatttcccaggtttcagaacagcaaaataatcgtatgtaaacaaaatgataatttttttttgctttttttgtttttataaagcacaaaagctatgctgctccaatcaaaactgaaaatgcttttaatgtctgagcaatcttaagagtattgatttaagtggacagaatgactgcctggctgatctctctgatgagtattgaagtactacttttggcaggtcagtagaatgtgttttgaaggaattataggtaagaacacaataggttaccttgagaactattattgaaacttaaagtaatattttggttgtataccataaatatatgcatttttaacttgccaatcaaaaaattgagttaaaaatactgttttcagagcaggtgttaaggtatttgcttttgggtttaaattatatgttgaataattgtttttattttctgtttaacagctgaggttatatactgaaatgttatgactatatacttcaatttttaatggtcagtgaagattattgttgtagtgcagagcttttaataataacttataacctttcttttataattccttttgggctatgtgatgtaattctttttagattttgctgtcggactttcccaaagagattaacttgtcataatcattagattgcttgtattatctcaaatcatctgttcaattttctctgcgaatttggttatcctctgtatctttttatggcctttgttttggggcttctttagatagaagtatctaatcatctttggaagatggtctagtctggctggggctgccataaatggttgtgctaatgtgacgtggttccccaccaccttcagatgtgaagtgcatcatgagaataactgtacagggaagtcctgggctagacacagtttcttctaaagaaactataaataattctgtcggtaacactttccttgtttattacctcactgagcagctgcatgatttttgctggcttccttaacttggcctttccttcatcaagacttgtccaggaacatcttcaaagatggagggatagattaaggcccatgcttagctggtgatctatacaggagaatccaatctagcctagtatataaattctatactgccttttttttttttaaacaaaaggaaattccagcaatgatccatgcttcaccccctctctaagcaggcaaggcaagaatctagataattttgtattcatttgggaagtcattctgatcatgagggaaaactagtatattaagcagtatattgagcaggagaattgaaataggaacagcttctattaggttggtgcaaaagtaatcgcggttttgccattaaaaggaatgcaaaacagcaattgcttttgcaccaacctaatggaagtccttttttctctccaggactggaaatgattgatgatctttacagggaaatatggccacctgattaaagagtgggaaagagagcagagagagacagtatgggtttgattaggacccaaatatgtccttgaggctctttccaaaggaagtagaaattcagaattgtcctgatgagtgcagggtttttgaatgtctaagataagaagaatttgtcaaaattttccttaaaatggggcttctgatgatgtgtttcccacaccagcagcacctggttagaaatgtagattcttgggcctgccccagacctacggaaccagaaactctggggatgtggtgcaaccacctgtgcttaatcaagcctttctggtgattctgaggcaggttaaatattgcttaaaatattgcagaaggtagtggtttgaatctgaccttcaaaaccaatgttttttttcacttacttacagtacgtcacctgagtttacatattgaacctgaagaaggtagccttgcagggggaacgtggatcacagtcatttttgatggtaggttggggttttaccaagtgcacatttcttatgtattgacccacaatcctaaagactatgagtctttggttttcttccttttctaaggacaggtgtaaaagtgggcctgaagggagacgaacagactgaccaacttctgtctttctagatactggcttgctaatgtcacagaagcaaagcacagcataccatgacaactctgtgtccactttcccattccaggctgtgggatgggactctgggatttctacatgagatgatatggaagtgtgtagcatagtgctcagcaatgcatctcccagaatcttggctatcttccttaaagacagtcctctacttgggagcttctgcaccattgcttagcatatccatccccagcagagtaaagagtaaatctgagggctgaaaaattcttttctggatttaggtgaacctgaagagagaaaactctttcataaaatcataaatgagaaaactcctttatacagcatctatgaggaaatgaggagtattaatttaatccttgggcaaatttaatgtcttacattacccccaggatcttagcacagtttcacactgtcctgtgtcaatgacaattctatgcagcctgagatttctttcccttgtgttaggtttggagttgggtgttctttaccccaacaatggctctcaattggagatacacctggtgaacgtgaacatggtggtgcccgcactgcggagtgttccctgtgacgtctttcctgttttcttggatttgcctgtggtgacatgccggaccaggtatacctgtctgggaataggaagaccagacaggatgagggatttttgcttatctcagtatcttttggtgacatattagagcaatttttgctgtgattcaattgccagccatagttgttaaaaaaagtttcatgtgaatatgctttctaaaaggtccctatctggggtctagaacttaacggaggatgagagtatggggaagaactttgagatattcgtaaggaggggctggattgtgtttccatttgtttttttttgcaaagagttctatggctattaagattttaataaatggtaccattttgccattgcaaatactcatcttttggaataggcataattgcaatgattgcacataaaccccaaactggttagaaaagaaatttgctttaggctctgtttgctgagtttgacattacctctatttagaaaatatttttataagactccagggaatctgtttttctactcaacttcttgttgccctgtgaaatttagactagttcatgttcatttttatttactcatgtcttaggcatgagtaaataaagtgcatgcaagtagatgattggttaagagaaaaaaaacactgttatttccttttcttttctgttctctctttgaggaagtctccccctcttccatgtttggctatggaaatcaccaaccataccacaaatgccaccttttccctgaacattcaactaagttatctttcccttttttgaaaggagaaggaacaacttgtagtaattcatccacagggtgtatgtgtgtgtacccacacttttctgtgcaattcatcaccccgaagggattttttttttttgtaatttacacaaaggtacagcacgtgtagccttagtgaccctgtgcctcagctctgagttttcataacacttatatgtcagttacccacttgtcagactcctcctcacagaattaagtgctttgagggcaggggatgtgtttaatttcaccattgtagtcctcatgatgcattgcgcaatatcttacgagtagaggatgttcaataaatgtctgttgaatttaacatttttataccactactattggttttaaaactgggttatatatttcccttagattttatggcacatttgggcatagacattctgcaaagacttgccatgaaacaagtcaaagctctggagatttacatgtcctatctcctttatcccaacatactaatgatttttggatgcaccattgattttatgtcatctttttaaagaaaagaaatatgatcctattaaatatactaattgattggaagacaaatatcagattcaattaagtgtgaaaaatgtacagtttttcatgaacaaaatatgtcttattcatcattatcataaaaacatgtacataattgttttctctaaaacagccattgcagcatcaaaagcagcacttcacaatcaaaatataatgtgaacacaaatgtaatttaaaattttctatttagccacttgaaaaagtcaaaagaaacaagtgaaattaatttaataatgtattttatttaactcaacatatctaaaatattatttcaatatgtaatctatataaattaataatgagatacttttatatcttttttgtataccaagtcttcaaaatttagtgtgcatgttataatcatggcatatcttaattgggactacccacatatcaagtgcttgataagcacataagactagtggctaacacaatggacaattcagatctaaatatttaaggtcatactaaagattttgttgggaaggtttggagaggaggcatgtcttaaatatggtttctttcttattagtcatattcttcctcttacaaaaatcaacatggatgtcagcatcaggtggcaatgaagccactgcaatatttgtataaagaggagagaagatccaagactctgttttgatggctacatgaagtatttatgggctgcttggacaattatcagaaagagcctaaattcaagccccactttgcccttaacgtttgaagctcatacacataagtctcttagtttttctgacattttttgaaacatggaaatggggaatagattatcaaagtctcttctaattcttaaagtccaatgaacctatgattttgagaaacatgacatattaaaaacaattcagggagtttcaacacaaaaaatcataacttttttttgctgaaggacccagttcttaaagtctaataattatgagtggatcaaagaggtgaaaggtgactgctgggaatccttggttagctctgttttaaaagtgcaaggaggaaatttgaagtggcaagtgggctgctagctttgggaattcatggtttttgattcataaggatttccactttctgtcctcagatctgtgctgtctgaagcacatgagggtctgtacttcctggaagcatacttcgggggacagctggtaagcagtccaaatccaggaccacgagatagctgtactttcaaggtgggttctaaggctggaggaaggtatgtttacatagtctaagggtgtgcttgtgttattgaaaggcaaattgtaaatgagccagcgtgtctgcttgaccgggttaaaagaaaatggtggatggtaatgacagagtttcttatattatactaatgaaagatgaattttgaacgtttgtatgtcagcctttagctaaatgctttatgtacatcatttgattcaatgctcacaattttatggggtagctatttactgtcctgtttttacaaatgaacaatctgaggctcagggtgattaaataatttgcccatgtcatcaggcagtaaatggcagaaccaagacttcaacttgcatctggttctaaattctcatcaaaatagaagcccatagaggggccaccaagattacttttgtgggtgtttcattttacagctcagatcatgctgagtctcagcatgttgaagagactcaaggccccacgttccttggtgaggagacccaatttctacctctctccctgcttcctggtatatttctgctaagtctttccaacactgaaccaaaagggcatttgctgctggaattctccttcatgctcagggagatcaaaaaggaagtagagagagagtgtttaggaagccatgcctgacttattttacagccttgatacctatactgggagttcatttatatttggttcagtctgttgttcatttcagattagttttaaacaatctctgaaaaggtcctagatggtttatgaaaggcagagatttggcggtactcctgtcgatgtggttgcccttcacatggggtacctctgtttaagagctgtttcaaaacatacaatgcagtcactaatgaatgctccttcggaataaggcttcaccttgtaaatttgtctctcctacgatccgtgtttcatataggctatttggttttgaaatttggaatttgctgttgtttcaggtttaataacttgtttcttaatccaagagaatcttgttttctggaattttgcttttgcacatatgcagcagaaagaaaaaacattatatcattcttttttactaagagctgcaccaccacctctatcctgtctcagggaacataacagaagagagaagtccaagcattaatcaccatgatccttttcaccccagatggtagttttcctgcttattaaaagattggttaggagcgagagggggaaataagagaaacgtttcctaaaattgcacatgaaagaaaacaagtccgtcagtggttcaactatcttggcaagttgatgaaaaatcaccaggggatgcagttaatgagaggcattccaggctaaataaaacacggcgtgtctctttgttttgggactgggactggggaaccatgagtattaaaaattaatcccatcttgccagtccactgcaaagagcctgctgtgggcgctgacaagtttgaataactcacagaaggttgatcacacagctggtggctgcagctttctcatcctaatctgctgcatttcctctcccctcttttgcttctactgaccacactggggcccgaggatcagcatgcgggaagcttgatttggaagctcattaatttttcactttgtcatgtctctagcctggtgggtgaccaggggcctgtttctcttagaaacgtaccatgttatgttgtgtcagctcagagagaatcacaagtgaagccctttttgaggtttaaccccaagcctgccccaccacgatctcacgagctgggagggagtaataaaggagttgctgtgtttcccatggaagtctggtagaaggattatagactgagtggtggctcttagatttcaggttgaaatagagaggtatgcttccttatttggtttggactcagttgttccagctgcctcaggttctaaacatctgtgaaataggtcaataaccactactgtacttcactaagctcctatgatatagtccagttgaaataatgttgatatgaaggcctaggggcagtggttggctgggagggtggggtggggactgaatgtttggcaggtgtgtgtgtaactgtattaatctttatcttttggtgagatcagagccagttcccaagctgtgaagtaacaacattgttattttgaccccctgacaccacatattttctgtgaactattttctaaccctttcctttagacagtgaggaaactagccttcatggcagactatacagcatatggatcaatacttaaaacctacgcctggcaagccaccatcagctttgttgaaatgtctgttgattctcaatctgattaaggctgttgattaacaaccgagttattctttggtgatgttctctctgggaaggtagactcctgaggtgctggaagcagaccaaacaaaacaatttgctgctgtaatttgttttgcaaatgggaagcactgtaggttgtgtggaatggtggtagtctaggcatctagaagggattgggggaggggagggaaggggagactaggtctcttcctaggtaagtaattggctcacaggtcaagccttggtctggccagttcatccttaagctttcctgtttcttcatactggccctgctgtgatttcctgatggagtaatgcactaatcttagactaacacagatgcctacaggtgagatggagttcctgggattgcctcgttctcacctctccttccaggcagtatatcagtcatcccagattgggtgactcttttcattcacaaaaattcgaatgtcgtctgcataccagtctatgcacagagacacagcagcgactcagtcaagcattgtccctgcctttgtggagcttatggttaacagagggtgtgctttggggacagggggcattgtaagatgatttggaatgctaccgccaggctttctcaggctctcactgctcccattgaggctgctttcctcctccttgaagaacaatgttgcttcccattccttgaatcttttgagtcatttccctcacagcaggtatcttcagtttccctagtaagcacctcagttgtgtgcctatccagtttctcatttttttgtagcttactgatacctaccaaggtgctggctgataatgatttgaagttttgattcaattaaataagtgcattcctttctagaaaaatcaaaatcttcaaggccccaaaacatcaaattacaatggaattaaaagactgacattctgcacaaagacctgtctacctttccttctagtaaaatgtgttcttgggtatggaaggtgggcaggtagaaacaggcttgtcaaggtttggacaatatggtacagaatagagggctatgtgaccttaatcaaattacctctacctcatctataggagaaatatgataatatctatcatttctgtttcatagaaatattacaaagataaaaagaactagacagatgtgagggtgacatgagtaaatataagcatttattaccttcaagtaatgctgtctgaggaaaggcttgtgcctcctgtgtttgtgaatattttaatgacatgctcacttgtggtactattttctaaacagttttccaaggcgcagacacccatcgttcaccaagtttatccaccaagtggtgttccaggtaagaaatcttctattaaaataggaataattgtgaatctgtttgccaaagcttgttgcaaacctaggtgagtggtttttatgagtgggaaaatttaacttcttctttgatgctgttttgaaaataagagtcaacctctggttcatttttaacgtgctttggttttacctctgggcacttttgctctattacttcactgataacaaaaggaatccaaacatgaaaagaaaaagaggacagcaaaatcaaatgagttgatgttggagactggaggaaagaggagtcatccttgcttttaactttataatcattcccataataataaacctttattaaactgtgtgccaggctccagtctaagctcttcagatatcttactagatcctcgccaaaacctgataatagaagagctatttttattcccattttgcagttgaagaaatgaggtagcaaaaggttaagaaatttgccgaaagtcatatagatactaaataccacagctgagatttgaaccagacagccagaatccagagtggcccatatatccaccattctgtcatattttgagcagcattggatgccacttggaaggtcattaactctagtcttcatctaggggttttgtttataaagttagagagcacacagatatttaaaagccaggaggatagaaaagaagattatataaagctgggggatttacataaaagaagggattgcaactgagaagtggattcaggaattgctaaatctgccttaaaactaagtagcaaacacaactaggattatatataatttgctgtctgattcctgccaaattcctacctttatttaaggttttccatttgttagagtttccaaaatggtaagagtgtgctaaaaagttgctaaatttttattatagttgtgtctaaatgcatagacggatcttgttgttttgattggctcaactgctcaagcatgtcaaaatgaagatctaagttattgaaaagcgttttatattttctgtgtttgtgtgtatagacacagattatgtatgagtgaatttaaattatatttcagagaatatgaatttggcatgctcttgctcatgtgggtttttcacagatctgctcctttccatttgtctgaatcattgggacctgatattttatgaaagagggatgtggtctgtgaaaatcacatgcagacatgtgggtccctgctgctctgatgttagaaactcctgtgtagatggcagaagtcttgttagggtgagggatgaggaagcagacagccattagaggtgtgaaatggaatgtcagctggcgcccagatctgccaagcccatttcttccaccaagttggagttctgctcggtgtctcttccaccttctggggaaaggattggtggcgggctgggttggagtggtcccccctgggcaggatccatacgactgcatctttgtaatcactttccagatgaatactctcatttcatttgggaagcctgcccagtgtagcagccagggagatgggggaggtggtagggacaagagagacgatgctttctgagcagttgggtttctatacgtggttagcagtccttcactacgacatggaatcccccatcaccgtgctctggtgtggccatttgtcagcctgtgctggccatcttcgtttagaaacaaaacaaaaacccacagaaattcctaatttctacagtcttttgttagttttaaaattgtgcctgtcaaagctagaagtcatactcaccaaggctagggaatcgatcatttagccctattaaaattagaattattctgccagattttttttagcagtaacaggaaacttgagactctggatttctgccaactctgtgacctttgcctgtcattaggtcattctacccatgcacctataaaattgtggctgtaataccttccgaaagatttctgttgttttagtgagagtcatccaatgagtgcagatgaaagtcacttcttactaataacacacaagtgcagtaggaagggaacatcttttttgtcacattctttggtggcattcagtgtctataaagaggctcagtcttctggatttcatgacctcatgagtccctcagtatgcttttctcttctattccttgaggtttatctcactaaccaacattcttttatctctaaacattgtctgtgatggtttaagtatacatggttaaatattctaattatttggaaggcacatacttgggatccctgaagacccatcagattgtgtgatatgagcctcttcatatcacatgttcattttagcaaatgcccagaggaaagtctcatgaagcctggagcacccaaggcacattgtccttaaatctcgtgttgggtagatggtctccacagagccaagagaatggaacagggcagtgtgtggagatgagcccctcctttctgaaatgttcacacaatctgagactgtgaagaagacccattattccttctatgctccatgcattagaagattaagtctgtgattgaaacaattgcttattttagcttttatattgtgtaatattgatcactaaatcatacccttgaccttactgttgtacaatttattaaaagtattaattttctgggccatgacctgctttgccatattgagtatatacaaccaaaaagaaacatggttttttattatacattgagtttgagctaagtccattaaattaaaaaaattcttcttcaaacaggaaaactaatacatgtatatggctggattatcactggaagattggaaacttttgattttgatgctgagtacattgataggtaagtgtgtgtttgtttttgtgtttaactagttacatacatgctgcatggcttcctgggaccagcttccctgatggcaataaattgtaagcagttggcacagaattgctattttcctttttgcagtttatggtccctcatgagctgggcttcagcaaactttgttaatgtaattgcaactggtcaattaagttggtccatttatttactgacaactagtcactctgggctcagtgtgaaatgaactgtaattgcatctgtggattttctttttgaattctcacccttccttcctttgtttctcagcctgaaatagattctttataaaatgatgtgtaaacccaaaagcccattataactttcttatttggttgttatccatttgtgctttaaaaattgtattagtggggtcagaggaaaacatggacacaggtattaaaagccatagagcttttaatgttttctgggaatgattaggatgtcaacatgactttcttcactggagacgtggtggaaagtgttactattaaatcatccacactggagagagagaacaagacaaaaagtgttgaaattgtagaggctgtaggaagctctaagcaactgtaatcattcaacaaatgaagcaattgtactgagcatttataaggtagaaggaaaatgatcttactatatactcagctgcatagattccatacatggtgtctaatttttccttcactctggatgggttgggggcatcctcttctgttctactccatctgtctgattttgccctagttgaagagaatatgatcttattactctcaggattgacatttctggcattaagcaatggtcaacttaccttacaagaaaactactcttcttgtggggggtagaaactcctactacatccttgggaatgtgccatattttgctaggtgatcccatctcagccttggtctgggatacagcctttgaaagggggaataaaggcataaatgcaatattatctctgtgtagaatcaatatagccagtgtggagatgatgaaggttttttgggaagggagaactattttctgtttagtgtgaaagcatgagccatgagtgcatccctactctctgctgagaatttgacttgacatccgccttcagccacctgcaatagtgcagaaaaatccagaggagagtgttcatagccatgtttcctctgagttttgtgaggaatgtttattgggagtattgcacaattatctcttgtcttttgttttcatttttttttaaatccagcccagtgatcttggaagctcaaggagacaaatgggttactccttgctctcttataaataggcagatgggaagctggtgagtgtcttattatcttgccaatgcacatgcttgtaagttcgtccacatggatacaacacacacacattctctctctttctctccccactcaccatatatctgtttttttaaaatataaatcacacatagctatttactaccttatctttagactactgaaaaagacacagggattgattcaaagtgcgtattgaagtggatgccaaaaccttccttgaaaacacatagctaatacttgttaggggcttaccataggccaagctctgctcgaatgctttacattgaagtcacccaataatcttgggagtatgtatggttattagtctcacattatagatgaggaatttgagacacagaaaagttaagtaacttgcacaaggtctcacagagagcaagtggcagacctgggatttgaaccctgtctaactaatcatcccctagagttcatgatcttaaccactatacttcagtgactagccaaaggtaaaaataataaaaaatttagaaataagtttctacactctccagtttaaatacccaatgttttgctggatttttacttcactctggacagggtgtgttgcccctcctttgaggccattacaagaatgatactctatggtttcactttttcagactggtgtgtattctgcccttgtgtgtagtcttccttgtgtctgcattttgtttgctcagaattgtcctttatggggttcatacttgataacagattttttaaaaataaaggttttgttatacttgtcatatgacacatttgaaaagaaaggaccaaatgcttaaggtagtactagttagcactagggcaaatgcttagggtattactaactagtatatataaagggtaatactagttagtattaccctaagcatttgccctaatgaactcattatactttctctgtctaccattttctctagcaaatttggttttcttttgctttctactttcctggttaaagagtcagatcttctggtagtgagttgtctggtcattcttacctcagtttgtcttttccttagttatcctattcaggaggaccatggtcttgggactctgcagtgccatgtggaaggcgactacatcggtctgttagagaagtaacataattttaaagtcttatccatttctttctctgtatccggacaaaagcaattgcaagattggttctcatgaggataataataataacaataattactatttgttaagaattccctggaaaatactactatatgaaacagctcatatagaaactaatttaatgctcacatacacctgtgaagttggtggtattatttttggctttgcaggtgagaaaaattgaagttagttaccagtaaatcaatatttaaatggtgctccatctaactcgaagcctgggctcttccctgctatgcaatactgcatttgcccttttattgctagaagtccacattgctaatgatgctaaacttatgaggtgttttttttttgtttttgtttttttgtttgtttgtttgtttttgcgggggggaaccactaaagaaattacaggtttgggtggtaatttgatgatattggagtctttgggcttatgaaagcaatggcctggcccagaagactcgtgcagattcctgagttaatgtgtgtttctttgtgttacaggctcccagaatgttagcttctcagtatttaacaaaggaaagtaagtaactgggtatagaaataggcaaatttgtcttcattttatattacctatctctctcatcttgcttactttctttatctttttatgacggaaaatgttaaacatataaaaacagaatagtataatgagaccacatataactccttgacttttttacctgggtgaatgaagttgtgtcctcttcactaatctgtaggcaatgtgtgtttcaatatggtggtgttgcagaattttgggaattaaatcttaagtaatttcaaagtactgtaggttgaaaactgtcacaagtatcttataaggaacatggtttcatgaaatacattgtaccatctaggaagtgccttcttgaaaatggaaggggtccacattttatcacactttgaagtgataaattagcattctggaattctgaatccttaccttatattttgcccctacataatttgacaggtgtttctgttaaaagcgtagggtctaattgataataattgccttgtaatgacagtgacaattatagctatacagcccaaagtatggagattttctctctttctcattttggaagaaataaaattaatgtctattgagtattgactataggccaactaaggactaggccctttcacactcatcatttcattgaacatttgggacatcctatgaagcaggcattattcccatatgataattttatatatcagaaaacaactttgtcctgttggtattgttctttagttatccaagggagctgctatttcaactgttctaaagatcaatagaggttagttcccaatcttcctttcaggcagccgactaaaaaaaatgcaatcccagttgatattttcattcaaaacagaactttgtctttttcgaaggtcaatggtccacaagaaggcatggctgatcagtgctaaacaggatcttttcctataccagacacactcaggtactatcccccttcaccaagtaccccttcccttgtgcctcactcaatgttggcccctccttccctatcttttggccatttcttgatgaccattaacacccgaagctgtccctacaatcatagacagcctggtgtttttggttgagattaaattgcttgtatccatgtcaggtttagttaatatattaaaagagacttgataataaacttctatacaaattctatggatataaactgaataaaagaaaggagagtcttgccttattctgtcttctgaaagtaaaagaaaaaaggtggcacttaaaaagtcttaaagcacatctttccagttactttaacatccatctctgagcattcattcaataatttatgactaatattgatattaagctgttctgttgccatctgatgagtaaaccctcatactaaaaaaatgaatgtgaaaattggaagcttgcttggaattgtgaactcgatttggtagtagaaagctggctactaaagaatacttagattctagaatggaatacagtcacacagccactgaagaaatgtctgtggggttggttcagattccagaagcaatcaaaatctacctttgtcaaaagtgcaagataattcacaggtcatggagaaaatgtcatttactctctagatagcctaatcctgcaacagctgcattttgaccctgatttttcctttctttcaacagtattgctagtctatttggggtaagtttgaagaagcgcccaaggtgatggtgataacgatagctgctatagaaagaatgtcagaccttgttaagtgtcttacatacaatctcaatattaatttcacttaactatgagatggattaacattagccccattttacagataaggaaacagactcagataaacaaagtatcttgtccaaagccaaaggtcttagagctagaatgtgtagttctaattccaaatcttatgtccatagccaatatatggtgggaagcacactcttcttgccactccactccaaggtttttgtgagcctgcccattgctatcaaaccctagaatgactgataggctgacaggtatctctgatgacacagctcttttacatttccagggcagtgtcttcttgggatcaggactcacaggccagaacttcttcacagcagagcaggctgtaggaagagagggtgtagacagccatgaagagccctgggctgagctcctcaggggctgacattcaatcactagttaagccttttaagctttttgagccttaattaagcatctctaaaactgacaaagtggtgcttatccttcttattccaaaagtcgtctaaagaggtagaggagcaagaatcttggaattcatctaaaatttctccttcctcctcctttccatatctgttcaatcaccaatttctgccagttttctctcttatttatgatgtatctgtacagcaactctccatttctggaccccatcacctcttgtgttacatgctgcagtggtttctagaggccctgacttgccctctgccccttcaagcccctccctggctttctctacatcaagcatatatctgatgcatggttccttcctattcaccatcctcttatggcttgctatcccctactggaaatggggcaaacttctgacctcctccttgtctgtttctccagctttatctctgtctctcatactccagccacacttaacatgcactgtgcaatttcttctgtccacactcaggctatcttttgctttaaatgccctctccttctcctcttcgctaggccacttctaattcatcctttaagactcagattagtgtcatctctaaacattttcttctacacctcaatactcccatcctactcccaaagttctctattctttcatatactctctaatttctccgacccaaggtattaaatgatagttttgcatacctgccttaccatgctgatcttctcgaggacaggaactattttgtattcatctttatattcctagtaccatataataggtgctctgtgaatgttgaaaaaaattatcaaatatctacaactatgttaaaagtttaagaacttcataaattttgtttttgatctgtgtaattttgaatgcataacaaaagaatgtgttaatctctacgtaaagctgatacaaaattccagtgctagtgtaaaaaaaaagaaattataaaatagtgggttaaaagcagggggttattatggtttagtggtgaattttggtatctgagtgtaagggatcaatctttgcctccatatgtctcctctgctttgtctcatgggcaaaaagcattataaaataacctcctaaaatgtctatttttcaggggtaaccattcatcattagcttttgtaccttcagtttacacaaaatgcaactcctcttttctctggagggaatgaatcttagaaatgtcaaagcttgatcgtaggagaggaaagaatgagataaagctaaattctgaggactatgtgtcatattactgtaggtaatttctttttttaaattttttattttattttttcttgagacagggtctcgctctgtcacgcaggctggagtgcagtggcaccatcttggctcagtgcaacctccgcctcctgggttcaagcaattctcctgtctcagcctcccaagcagctgggattacaggtgcacaccacggaacccggctaatttttgtatttttagaagagacagggtttcaccatattggtcatgttggtctcaaactcctgacctcaggtgatccacctgccactcgcttcggcctcccaaagttctgggattacaggcctgagtcactgtaggcaattttaaacaatcaggagcagcatgaaagaactgggtatgaggtgtgaggtacatgtggggaaggagcattcagtgtgggaaagagtgggagggtcctaaagacagtgaaattcattcttctgcttagagcaaattacagattcatatgggtgaactgaagcctttcccagtgtacccaaagttgattcctccttgtgttgtaacttactgttccctgacttgtcaatattgtccttgaggtcaggagacagattttctgagaaaatgtcatggtactaggggcttttgctgataccatgaatgattccacatttccccttcctttcaaatattgatcctcgataatatatacttctggtctttttcttattatgtgcatttttaaatagttattactagaaaaaaattcaactgttgctggacttagaaagttaaagtaagaaattattaatatctcctattattatattattatctaggtcatattctggtctatatttggaagcttacttttttttttttttaactcttgcagaaatattatctgtgtttccagaaactgggagccttgggggaagaacaaacatcacaattacaggagacttttttgacaattctgcccaggttaccattgcaggtaactatgatgaaatggctgaaaatagttcatagttttagatgctctaggagattatatgtctgtatggcatgagggatgcaggaggaagcaagctttgccccttctgactcatcatgtttgataagtcatgtgtttggttgagaccaggtgggattttggtcctacagtacatgggtcacaggaatggaatgtcctgcagacacactcacaatgcataggcaattccctcaggtgcccctatcttgtgagtgaagagaaagaaagaaatacagctccttcttgacaaaggtttacttctactaaaaacagcccctctcttcactctcccttgttagctgtcttgatatagacaagcaggagtgggtgggcatttgctatgcagattactctggaaatcccccgcaccccaaccttggcaaacccttttatggacctgtctagagccttttgttttgccaggtcctgtagcaggtgggatgcctctgtagttggtgacaccaagggtgtcctcacactgtcatgtcacacttacctcccatgctcagttaggtggttcagtacgtccccaatgaagagcactccattgcatggctttccttctgaatactccacgctgccctatgctctgctgctctgcactctctcttttctccttcaattggggtgacaactttcgctattccatccacacccagccctttgccttagaataggagcctgtctacttcagtctggtcttgccatcacatctcccgactgcctctctctctctctgtctctctctctctctctctctctctctctatatatatatatatatatatatatatatatatataattatacatatacccacacacatatacatatatatgtatacctacacacacacacatacataaatttctttaattcgctttaggcattccatgtgatattagacacgtgtctcccaggaagattgagtgcaccactcgggctccaggaaaagatgtgaggctcaccacccctcagccaggtaaggaagccaccagggctgttcaataaactctgaatatctttaatcatgatgggctggcgagtagaaataaaagtgtttgaattctttctcatctatttgactggcttactcagtgagccctgggtccatgataccattgtcaaggctctcctttcaggaaggctcttagctttattcaggtgcttagtgacattgcacttctagctccagccagctgtatggccagtggcgtccagaagagaccatggtctagaaagcataactgccctcaagatattgttatagctactggaagaaacccccaaactgcccgccttcattcaatgggtcagttgcacgtccactggctaagaagacaggagcgttagagtgtgctctgctatgctcaaaacaacagcattagacaaggtcggagagtagggcacaatgggatgcatttaaatatgaatttttctctcttgtgggcatctgtctgctgctttgagaaacagggatatattgtgatgttgccaccaggttatgcctgaagtgggcagaaatggaggaggcaagggagcttccagctgtccttctctgtttaaagcatccaccctacagcagcaaattaagagcacaatactggagcacttttctgctgagcattagaactgaaggctcaagtgtagtcagggatgaagggcagttggtatgttactcagccaagaaccacaggctgcacatctgtgcccaagggcctgacttaatggttaaactacaggcagcgagagtcaactctagaggcacagcacctacaaggaaagttgcccagcaggggaagaaacctttctaaagaaagggcattcaggtgtgaaaatgcatgcaaagttttggcttgagaattctccagctcccagatctgcagtttttactcagggaaagcttccatccaaggaaacaaaactactgaaacaagtaatcaagataatgtgtgtttcctgtcaggaaatagagagtctgctccctttttcagtatttcctgctttagctacttgggtagtggtaggataatttcctgaatgcagctggtttgacagttagtgttgtcctttatgaagggcttttgaagtttcttccacagaagctgggcgaattactatggaaaccaattgttctcaaccaggggcaatgttgcccctcgggggacacgtagcaatgtgtagaaacatgtttggctgttagaccggaagtggtggtggtggtgatgatactgacatctagtgggctgaggctgggaaggctgctagacattgtgcaatgcataggacaccccctcacaacagttacccagcctaaaatatcaatagtgctggggtggagaaaccctggtttaaagtaatattttcaaaatatgctcttacttttctgtttattccttatccacctctcccttttaggagttgttgaggaacaacagtattagtttaaaataataattaccataattacctttattgagcacttactgtattccaggctctttgagtatatattttcccttggtcctagtgtattattgctattttattattggtcccattttgatgcatgagaaaatgaagatgcaaggacatcaaggaatttgctcaaagctacacgtctagctgggattccagagttttgccttcagcccaagttagcattcaatattgattgcacctgtgcctttggcctcagggtttgcttaacacaaaatataaattaatacaatatcatttaaaatgtcacataatagcagcatgccacatatttggctctgtgtgcaggtccacaaattgaggccatgacacttgagaaacttaaggattgccaatgttatggggaaaaaagactttagagaattgaatttcacagcagaactgggacttaaaagatactgaagcccacttctggctttgggaagcacaaagccaagccacgtcaccagcacacagtcacattgtcctccttttactcagcctcagcttctgtttgctcattcaattcacattttctccaggacttgattctcttttctaggaactcttgctaaaaaaggctaactcctaacccatggaatgtttattactttccggaacatttgtatttcatattaactacagaacctttcatataactactctatctggctctaggttgacttacctttacaggtagcatctgggtcatctttcaccttgtaatttaaaataaagtaattccccaatttgggaaggtgcgccctgtaatgtttatgcgatctacatgtcttacaggcaatcgagggcttctttttgaagttggagatgctgttgagggactggaactgactgaagccaccccagggtacaggtggcagattgtccctaatgccagttctccatttgggttttggtcacaggaaggacaacctttcaggtatgttgtaggaaaagtgggagcccacatcaaaagcacctttgctaacctaggtgaggctaggagacagataaggaaggtatcaagatttccaggaatttataacactagccaattcaacaacaacagagtttgacagtattctcaatcagtgttggtcatgctagtgcagggacaaattttgatcaatatgtaatatgtatattttccacaacttagtttacaatctgttttggagatgattatcaactagaacattgagctgagcaggccaggagactggaaagacagcagagtaaaacatgctttaggtacctggttaagaggtaaaactaacatctggttgatgccaaagaaagatccaagaatttgccctttgggtacatgagggagcaaagcctaggcagcatgctgtaggaacagccttccagtgctgaaggtcaacccaatggcccttgtatagtaggggaagctcttgcgggttctgtgagacattgttttcagtagtagtgatggcatcatgattctaattttcctgtttaatggtgtgtaattcctttagtctttttagtcccttcaaggatgtagccaaaatttctagtattctaaagtaaacttaaaaatataaaagcttgaaaattgcttagacacactgtttccttagtgtgttctcagtgtatatgttgaaggatggatcctttactgaatgatggatctcttttccctttgaaatccttcttagagaggatgactgtgactcatgagtgtgaatttcagtcagtctgtgacctcctccaaatattttaccattttattaggttggtgcaaaagtaattgcggtttttaccgttgaaggtaatggcaaaaaccgcaattacttttgcaccaatctaatagatttcaactcagttgtgtaaagaaaagcttagagaatttttaggcattgaataagccaagtagggttggtaatctgtgagcaggaaagtgtctcctgaagccttacttactaggtacttaaccatgagtttatggttttaaagtggcagttaaggctggatgctatggcttgagcctgtaatcccatctacttgggaggctgagacaggaggatcgcctgagtctaggagtttgggactaggccctgtctctaaaacgtaaaaaataaaaaattagccaggtgtgatggtgtgcacctgtagctacttgagaggctgaagtggagaattgtttgagctcaggagttagggctgcagcgagccatgatcacaccactgcactccagcctgggcaacagagtgagactctgtctttaaacaaagaaacaaataaacaaaaatgtggcagttaatttgtggtccattgtagcacctaataattcatatttatcatagtttttaacgaccatttaataatgttcaaaggaaaatctttcagctgcatttggtgtatttgggagtgttaaggagtgagtcagcctaccccaaaaggcaaaagaacattttgacttctatagtaagtgttgcagggtatgtccctttaactgccattttgaggaaccacaagccaggtagtaactaattttccattccctctctcattaatctctttaaaatctaaaaattttaaattaaaaaattaaaatattcatttattggtaagttaatataattatattgtggacttttaaagtagttatgtttgaagctatttttaggtatgaaattatctcaaaaataaagataatgtatgtacattaaagcaaaatttaaaaacatctttatattgatcatctgaagatttaagaaaatagcattatcagaaaatattcttggtatttatttacagagtctaatcagttctttaactatatctgcctataatattaggttgctggaatttaaatattaaaaatattatcttttaaaaaatgttttatgaaattgcctgtaatcttcttcaaagttgcatttgatgggttttaatttgaaattgttgacattttgaattgacgcttatctgtggatcataatatttttaattagaaaaatgctctctgcaggtgttgaggtagctggtaagctcagagcaaattctcataagcaatctgtctttatttctaataataagaatagtatttactatagattgagcttctaccatgatccagggcttgcaatagctgtgttaggtggttttgtcagctaagcttccgtatagctgtgtgctgtggctacaactttcccaaacatgacacaacagcaagggtatttgtgtccagtgtagagatgtattgggctactgagactaggcaggtgctatatctctttctagaatattctggacaattgtgtggcataagaatcaggttgttcttctttattaccataaaagaagacaaagtacaagggcagtcatttgttggttcagtgattcaggccttggttactcttgcttgactctatgttctactttacagagcacggctcagtgggttctttgtggctccagagacaaataattacactttctggattcaggcagatagccaagcttccttgcatttcagttggtcagaggaaccaaggactaaggtattcactgtcttctcattttccttttctctgttgccagtcccatacccatgaagaaagaaagaatcaaagttaaggctctcatgttttacagatagtttaacatgccattggatgatcaggaactttaattgttgaaaaagaacttgtttgaatgtgaacgtactatttattgagcatttactgtaagccaaatattatgctacatcttttatagaccttgtctctagttttcactgcatctctgcaaaatgtatgtatgtatgtatatatgtatatatattatgtatgtgtttgtgtgtatatacacatatatacataaagatatatgtatgtatcttttccacatgaagaaattgaggcttggaaagattgtgtgggccaggtgtggtggctcattcctgtaatcctagtgctttgggaggctgaggcaggcagatcacttgagcccaggagtttgagaccagcctgggcaacatgataaaaccctgtctctattaaaaatacaaaaattagccaggcatggtggcgcatgcctatagtcccaactacttgaggggctgaggcaggaggatcacctgagccttgggcagtcgtggctgccactgcactccagtctgggcaacagagtgagaccttgtctcaaaaaaaaaaaaaaaaaaaaaaaagaaaaagaaaaagaaaaaaaagaaagattgtgtgcccaatccacttggatagcaaaaggcacattgaggattcaaccccaaatttacctgactacaaaacttgtgccttttccactaattttgggtggagatgtaggcagctgtatgtaggaattcctcaacaacattgaaggataagaaaagatgcctttaacagcagccaaaatgcacttatgctattgacaaagaatcacaatattttcctcaaattattactatgtatgtctgaaattgatttgctagtttattggagaaatgtcatagattttgatgtgatcaagtcattcgaggtctctgaagggcttaatactaccttctccatagtgtcatgtaatcctagggtttaggttggttgttccttctctgaacatggcccatctattctcatttgagtactactcaattgtaagagatagatagatagatagatagatagatagatagatagagagctggagaagcataaataaccacagggctgaggtaactgggttaatatgttaaaaaggcagaccagttcaaaactctcttgatagtagcagttcagacacttagtgtttgagaaagagatgcctggaagctgcatagtattgatcatgatatgcttatttgggcataggtgaaagtggcctccatcagcgtcggcactgctgactggtttgactcctgggagcagaatagggatgaagggacctggcagcagaagactcccaagttggagctgttgggtggagccatgtactacctggaagcagagcatcatgggatagccccaagcagggggatgaggattggtgtccagattcacaacacctggctgaatcctgatgtggtcaccacttacctacgggagaagcaccagatccgagtccgagcccagaggcttccagaagtacaggtctgtgtctctttccagtcccatggagctgaactctggaaggaataaagtcccatgtagcaggagcactgactgggagtctggcgacctgaggggtcattataaccttgctgtcaaagaaataggatatctctttaacagcattgtgaagatgtttacaaaaatgtgatgtcttattcctgagattatcttactcattgagttagttttaggaatttaagttccaagcaagtcttcttttagaaacttatttcccagaaaagagacaaggtcctctaaacacacgcccgacatgtatgcgtgcatgcatgtgagcatatacacattaaattccataatttttgactgattgaggtcctatttccctatagcctgtgttttctaagtctactttgaaaaggtcatgtcctttgggtctctcagctgtgccccatattttctttgaagagtttttatgtgttatagtttttgttgttcactttttggtgtacaaagacaaatcaatatgaactctgccctctaaagcttacagtctaaaagtaaaacatgtgcacaaataaccatagaacaaagtagaaagtaacaattgatttaagagattaaaagctggccaggtgtggtggctcacgcatgtaatcccagcactttgggaggccaaggcgggctgatcacaaggtcaagtgatcgagaccatcctggccaacatgatgaaaccccatctctactaaaaatacaaaaattagctgggcatggtggcatgtgcctgtaatcacagctacttgggaggctgaggcaggagaattgcttgaaccagggagtcggaggttgcagtgagccggcatcacgccacagcattccagcctggtgacagagtgaaactccatctaaaaaaaaaaaagctgcatagaacttactcagtagcaaaactataatgtgccctacagggaatgtgttgatgtgttggaagcaaagcagagactgcataagcctccaagagagggtgcatgccatggagctgcttctgcctgctgggctacccttgggagaaagcaattggtgagaggggctgaaagtgcagcattcaatggcaactgttacatctcatactctcaatcaaggggcacagataaataggaagactgacatctctgttagtccaacaaaagttctcattaggcaatgatgctgtgttcctcagagatttctgaatgttaaagcattgaaaagttaaaattataataaaaaggaaatagcaagttgaggaggaatgtcctgtgttcttagattgtctctctggcttaattagcaccatcatttagtcttgtctgtcttgacttttttaggtgctgaatgtatcaggcagaggaaacttcttccttacttgggacaatgtctctagtcagccaatccctgcaaatgccacagcccatctggtgggagacttcttcaaaaaatgagggaggggagtgggagaactgggggtggtctttatgctcatgatataaattcctggcatttttttcctttgtaatagattcaaacaaccattgaggagttacttgcagtaaaatgcaaactggaacccctttggtctaacatccttctccggcttggatttgaacgaggtgctgtccgtggcttcattctgattgtctttttcatcatggtcttctttctttctataaaatgagaacaatccccatttcctctccaaggtgataacagagtaaaaaaaaaatatgaaacctggatttggacactgagtggctgagggactggcactgcactgtgcttgggaggttgatgctcggtgggtgtcaatagaaaggaaaggcattcctcctgggctgttaggtagagtgcagcaccctcctatactccccatgccacacggtgggaaaaggtcaaagacataggtgagaaacatgcaaacatagccaaaaccatgctaatcttcagattacatctaaaggaattactacttaagaaagtagtcttaagaaattcttaaaatgttagggtatgtttttaaaactactactaaggcgaactaaattctagttatttttgaacacctcttccatcttgatattccttgtctttttgcttctcaatagttttccgtatcctgctacacagagaaaatgctaaagggttttcaaggctccagggaacacagaatgagtttcttatagctggagctttcaagccaggggtgctgaccactcatgctgtggccattcctcccagggctgaggggcccatatcatggtgaacaggacagcccctacaacaaagaattatccagcccctaaaatattaatagtgctgaggttgaaaactcctgctctaaagtcttcttgtgccaacaactttgtccctgagttagaaaccaaggatgctgggggagttagagttgaggaactgaggctcagagaggttgagttacttactcaaggttgcatgggtaattgggttagaacgggggttttcttaagtgagatactctaaaatcctcatgcacacatgtagggaagctctgtcttttttaatatctatgcctgcctttctattttatctgaactgcatccaggcccagaagtttccaactctgatggggacctcaccagtgggacggagcccttctgtggcaggttcagcctccgtcagcctcgacaccttgtccttactcccccggctgcccagaagggctatcggctagatcagtatacacacgtgagtagcagtctttgtgcttctgggtcaggtgggtaggtattggtattgctctctggattcaagactgaaaactcagaagcacaaaggagtgattgctgtgatctgcccaaggtgtttcaggctgaggttctaggtctctcgactgctgtttcaggtatgaatggacaccactggcccccacttgtgtgttgttacctggaaatgcctttgtattagctgtgagacttgtgaaagtttttatttgctacaatattttctttgatctctaagagtacagactgtgtcattggactatctggttttaaatcctgattccacacccaatgtaccttccatgtctgtcttaagtacagtatgccttcatttactcatctgtaaaatggacagtaatgtggtctatctctcaggactgtggtatagattaaatgagataatctagtaaagtgcctgcacagttaggacccagtgaaggctaattattattactctagttgttgtcattattgatggattgaattgtctgatgcatttcgcaaacacttcttaaatcctttgcttcgatagctccaccacccttgtaaaagaagtgcagctgatttgccctttgggaaccagagtgagttttgctggagtggtggagctcatggcagtagtttctagtcttttcctagttgggctgctgtgggagttggggctaaatgtttcaggcttgagctcctcccttcttcagcctcatctcttctgcaggggcgcccagtggaggtgattttgccccccagggaagagttggcaatgtatggagacagttttcgttgttgcaactggggaagtgctattggcatctggtgggtggaggccagggaagctgttgaacatcctataatgcacagaacagcccctatgacaaagaattatccagcccctagaatattgatagtgccgaggctgaaaactcctgctctaaagtcttcttgtggcaacagctttgcctttaactgagttagaaaccaaggatgctggggagttagagttgaggaactgaggctcagagaggttgagttacttgctcgaggttgcacgggtaattgggttagaacaggggttttcttaagtgagatactctaaaatcctcactgccaagcacagtgctaagcatttaaaaactctgtttgatgacatttttttggtctcagaaaaagtatttattgtatttttccttagctttatttaggtagggaaataacaatttaagttatttgtctctctggctacactggtaagctctggaagggcaggaactgtgctgactctctcagagcctatggcagggttctagggatgtggactcctcactacgtattgtttgaatgactgcttcttgcactaatagaactgaaggacttatttggtgtccatagctgtgtcttgcatacaaaggccacatgaacaagatcctgaagatgattgtgtccttcacaatcggctttcaaaacatggtaaagaataccacctgtgactggagtctcacgaggaccagccccgagaggtagctaatcggtggggaggcgtggtgggaattcagtcagctgggaggattcactgttttggggacagttacccacctcaggcactaatggtcttatatttgggcctcatacactaatttggggatttgaatatattttatttgacaaaaaagtttgactccagagcagttagttgttaagaatatactactccctagagggagtctgacatttctcatagggatagaattgtagaacagcgtagttgggggaaaccttagagaacattctttgacatgacagaaagaggaaatttggggccccaagaatttgtgattcatcaaaattcattcagctagtgaccctggaataaaattcagctgtcttgatcccttgattcagtgctttccacataattctcatgggtcttgtaaatggtcttaaacctaaatgaaactggtaatgtccagaagtatcaatcttctctgtggttacagcctcacattataatttgcttaagacacacagttaaactgtaatttgaaaatgctgctgacattgcatgtcatggatgaatgattgacttaaaaggtgactactagcattataaccaaggctgagctgatcccatcttgggtgggatgtttgtagccttggcacccaggactgcttgggtgcaggggttcatggggtctctctcctggctgcatagctcacaggccccccaggttgggaacaagggctctaaccggagaggactgcaagtgctccctgagagcccagttctgctccatgctgtttttcagctggcagttcgattgcactgacctctgggagacttgtgtgcgttgcttcggggatctccagccccctccggcaaactccccagtgctggttcatcagatcaaccttctccctctggcccaggagacgggcctgttctatgtggatgaaattattattgcagacacaaacgtaacaggtaatcatcaaattctctctcctccacaagccggtcacatgcctacctcaaactttcctgctaggggttactgttttttttaatgaggagagaacaggtgatcctcctttttgcctgccttggctctagaaaacagatggggctgggattatgtgtctttggtactatgtctctctagtccctcttctttcctattttccccacgattttctcttacttctggtgtctgtattcttactccagttttcccactttcttgctgggaagtcttggtttcttcatctgtaaaatgggtataataaggaccctacttcattagattacggtgaagattaactaaagtttaatataaagtactccttactggtcttgtccatagaaggtgtctaataaatataagcaattattgttattattattgttatcattagactagcaggatttctccacctttccatgagttaatatgtcataccaggtgctggaaggaactcagcagtgtctgtctctgtaaatgggccaagagtctgatttacaaccttcaagacagacgcagtgagagttagaaggtaatcatcttcttcagagagaaggcccttgtcctttctgtctctccagactcttcctactcattatttagagatcaggcccggctcttccttcccgaactctcccttgaccactcttgggcacagtggtctcacctggctcttgcccgctagtcttagggacaaagtcctcctcctgggccctgctgaggtgtctgtgtgtgatgtgcgcccacagccaaggcagaatggtgcagtttgccctcagtgtcttcaggcttccaacttttgctcatgtttccttctctgtcaaatcccttgtggctttggggctcagctagcctactttttatagtttatttccctctccaagaagaaaaagatgataccttaatttacattttgatttagaaaatgtacaacttttcagtcttttgcctaaacattgcagtactgaaggcaggggaacttggggatgggtggcaagaggactctttatcagccttgaaattacatcatctttgattctcatcaaaatcccatctctcctctgtttccatagtttaagtgttttggggacatctgggtcattgcttattgttccaaacctgtttgtgctctggcacacttagaaaatgacactactcaagtgacgtgctgggtgactgcctgaattttttggtgcccaagacaactggctgggggtctttggtgaccccaagtgctgcctcaatttccagaaggctgagggaatcaatatttcatacactggagtccactagttggaaaactcaggactggataataggtgctgttcagttttcttttctctccctttaatgccattctgcctcgccaaacacttgaagccaaggattcagaactttttcttactgccctcacctctttgccaccaaattctctgtgtatctggaatcatccaggggtgaggtgaggtgggagcaggaagggagagggcggagacaagagggaagatgggggtagcatacatgaaacggtctgcctcccactttatcacattaaccctgctggcaatggctttgttttcagaattatttaatggcaacataaactacacaattgggctcaatattcatagttaattgtatatcatttatctgatctcaattttatacttgatgatattcccctgactaatgtcctctatgaaacttctttgtatctcccactaccactggatagtggtagcttccatttatttctcgtttagttctcagaagcccatgagttggtcctgttatccccacctatgggtggggaaaccaaggctaaaaggagtggagtattttgccccaattcacacagcggagctgtggaggagatcggaatctaatgatcactgaccctcgaactgatctacccagctgagcaagtaatcatttattgaccacctagtctatgcctagcatgtgctaagcatcaagcatgagaagacgaattagacaaaggtgttgcccttaaactctttaaagtctccattgtaaccaatcttggggaagaagctaaaaggatgttgatattgtgctgatcattttaaatcttaaatctcactaagctctccttgtcagattgattgctatcaatcatgcatgtcataatccccgctttacacataagaaaactgagtcttatggagtgtgtgtggattagctgagtgggaatccaatagaagtgaaaaaatcaggatttgaccagtggtctctcttaaagcttgcaccctttctgcacacatgctggctccacactgtggataaacacccaagtgcccctgtgtatgcctctgagttcagtgctcctaagaggatcagctaaacatccctagagttgccaggggctgtgggaaggaaaggaggaaagggtggcaggctatactgcaatagattaactgtgtaggagtgcctccaagagcatagggagtgacattttactagctgtggggttattgaacttttctatggaatcaatcttcatctccttaaatcaggaccttgcactttcctttttgtactaaactgaatggcttatcctcctgcgtcctctccatgtgttctttatggcagcagataagtaggaatctatgctttaggtgtgtactgagatctgagtaactcacatttccaactgggattttccacacagcaagtctaccatcttaagtcacttgatagtaattggatcactggtctctagtttctcaagctgattctggaacggctcgcccagggggcaatctggtggaatcagtctctgtggtgggatcccctccggtctacagtgtcacctcctggctggcggggtgtggcacggagctcccgctcatcactgcacggtaaggagtggcttttttacacctgtcccttctcctaagaatgcttgttggccttgagggacacaggtgtgacttttttcaggaaaagctacctgtcttgttgcttaaagcaatgttctcaatcttgagaatgcagcaccagattcacctggaagtattgttaaaattactgggcctactgtcagagtttctaaggcagtaggtttggggaaaaacctgacaatttgcatttttaataagttccttggtgatgctgattctgctggtctggggactacgctttgagaactaattccgagtcagttagtttaaaaatagtggcattttgtgctgttcagaggttcacatcaccactgttttgttttgttgttgttcttttcattgcattcctcatgtgttaatcttgttgaaatcctttgaaatgaaatgtctagagaagaaaaatagctatttctaagaactcaccaccagatggcactaaagccccataagcattgcttcataataaccatttctagccacagtttacaaagcagtaactaaggatcaggcttcttctaagcttctggaacacatgtatactctaatttgttcttttaatttttcacctaaaccccagtagaatgggaagaattgagtgctctgcctttgatgtatgtatatgtatatgtgggtgtagggatatatatattcacagtgtatatatgtgtatacacatatatgtctaaatatacagtcatgcaccacataacaatgtatctgtcggtgatggaccaaatatatgatggtggtcctataagattatactaccatatttttactgtagcttttgtatgtttagatatgtttggatacacaaatatgtagcattgtgttacaattgcctacagtattcagtacagcagcaggcttgtagcctaggagcaacaggctataccatatagcctaggtgtgtggtaggctgtaccatctaggtttgtgtaagtaaactgcatgatggttgcacaatgatgagactgtctaaggatgcatttcttaaaatgtatcctcactgttaagtgatgcataactgtataggtttctttctctcatctttttctcatatgttccaaaatgagttctcgtacctacagcatgctgcaatggcatattaaaggcaggtgcagaaagtttgaacccgtgctttactttccttgactaaatgtttgttccatggtcctctgggcaggaaaagcaataaaaccatccattgaaaatgaagaggtgagacatcttcagtggcagagaggaagcccaccatatcggtaggctctaaatgccaacgtttttagctctgaaatgatagacacgaattaagttactctgaaatgattctcacatcgagtggtcctgaaaactcccttactgagtttcctcaggtcccttagctctttctggaaggctgcagcctaagcaagacaggacatccttcagacaaggtcctcctaggtgcacaccccaacccagacgttaatactttgtttctgacgtgccacagctctgtgcccactgaaggaacagaagagggatctggactggtcctggtgacgacacagagacgacagcggacaagtccacctctaggaggacactttcgcatccagcttcctaatacagtgatttctggtaaaggggtgattggggttgcaacaattctcactcacatattctcactcacattcccaagggaacaacatcctgggaggttgtcagacaggtgataatattaaagctattttatttattttccagtgtctgaaagtgacattcttaaagtgaaagatttggaaagggacttattgttaatgctaccccaacctttacattttgtagatgcggaagatgtatagttgtggaaactgagtggatcagcttcctgggactgttgtaaggagttaaccacaaacttggtggcttcaaacagcaaaaaatgattctcccccagttctggggccagaagtccaaaatcaagttgtcggcagggccacactcctgtgaagtatttgctcctgcctcttctggcttctggtggtggctagcatgtcttggctgtggccatatcactccaaccaccgcctctgtggtcacgttgcttcttcctcttctatctcaaaattttctctgcctctctcttataagggtacctattatataattgtatttagggtccacctgggataatctaggacagatttttcctctcaagacccttagccacatcttttgccatatgcagtttattattttgctttataagttaacattcatattttctggggattaggccattaggccatcttttagggggttcaccgttcagccaactacactgaagcttgccaaaaggtcatacaaatagctgatgacagggtccagttgtgaacccaggtatttgattcctgggtcagtcctcttctttctagagttttatagaccaagatacatggtagccatggtccgtcagagttagacttaatggtgacaccatgtactatggaggatttcagtggtcccaacaaatgtagaaagaactttcagatgcaattagagtagtgtttgtaaatcttcaagaatacatacaatgcacaaagaacaaagattagaagtgataatgatacgttacttatttggtagaaacatggggaatcagaagcaaggctcagtagaacttgagaggggctgtataaaagttggaacatggtccaaaagtcttttgccctcccaagcagaaagtccctaggcctgcacaggaccttcttgggtgagaggaacagagtggtatttttattataatagggtgactcaggagaagtcgaagatccctaggtgttgattctggtaaatgggggaaaaaacatcaatcgtgccctgcctctatgaggctcattactgtgctatttatatttgattttacttctcatggaagacagctcatccgtagagacttcctgctactgatttctatcactgatgatcctcagatcaccgcctgcaaaacaactgggaaagtcagccttggcctggccttttgaatgatgatggatctgaaactctgtataaatgtagaaacatgatttgtaaaaggataacaatttcgtttgcaatttagaaacgcagtgatattttattagcccttcagggcagcgtggaattcaagagaaatgctcttgagtaggtagaaggcaacctgtgttttcatgtaaacctgtctttctgcattggcaagcttctgcatatggttgggtttcattttcttcatccctaaagtagacattaggatacccaatgacccacctcacagggctgctgggagcagctaatgaaatgggaacttctggtagagcacaaagcagggttcaaatacagagagctgttattcttctgtggggacatggaatggggaagcaggtggttgggcttaaagaaaattctaatagagaaactgaagttaaatgccaacattcctcagctgggctggccaagtttttatgggtgtcagctgctgtacgcctccctcactccctgtgaaaagtggccaatttttctctgttcacagggccagctaaatttttccagggaagatctaatatttaattatgctttcaggcattacaagggtgtgtggagtttacattttgagttgacagttgagatggttttatctgacatggctgtgctctctgattgctgtgtgatatggtatgagtgaaagatagtgtaatataaaaagtgggcatctacttgtctttaccttaggaaaaaatggtttaattatggctggggattctactgaagttctactttgacagaagggtctcctgaaaatttgataggcatcctagtatgtatcgtgttatccttgaggatgaaactctgtaaggtggattaattagtgtctgtgttttctgtatcaaaaccttctctcacagatgtccctgtacaaatttctgctcatcaccttcaccagctcttacagaataatgccgatgacttcacatccaggtacctcaatgccagtgacttcactgtgaaggaggatctatacacttgctacgaacacgtgtggaccttgtcctggtccactcagattggggatttgcccaattttatcagggtatgtatagtatcccttctagtggcatggatttgctgccctggagaaattctgcaaaaaaaaaaatcagaattatacaaatggaaactgtcatgaattattaattttgttggaatatttgagtaaagggattctatgaactttctttctggaagttttcaacacatattttgtatatcatatccctgaaaaagcaatttaaacccaacatctcccttcctaactcagtgtaggtagtgaagttattggtcagtgtccaccatgcaataattctacatctgttattggataatttaagcagatgtgattgacttagatgattgtggaagcagatggcatagcagaaggaattttagaaaagaatttgctgtctttgggtaatgacaaaaccagatgctcttgcatatttagggtcttaaaaaataatctaatgatcaactagcatttggttattataaaatgaagcccaagatgaaaatttttcctagttgtatggtgttgtgggttatctggttttcaatcgaaattctagaaaggagatggaggaagaatgggagaccttgctcttatctcatggcactgtttctttccactttattttaatattttggattgcaaacatataaaatggaaaagcatggagaagcaaagtgtctcaagacttagagagaagattgatttattgtacctcttttggcaatccacttgcaaatgaatatttctctaatctactgggactttcctcagccattatttactgttacgtttctatatttcaattctctgttactctgctttcactttctagctgtctgattatctgaaacacaatgtgaaaaaactctttattatttgattagacgagattagatttcggttccatgacagaatttaccagaaatgtaaccatctcaggtctctgatgaaaaccttactggagtgaatcctgctgcagccacgcgtgtggtatatgatggtggagtttttcttggacccatatttggagacatgttggctactgccaaccagcatactcaggtgagagtgaatgggccaccctaagtgcaagctccagtttcaagtctaactcactcctcactgatttgtaacatggactcattgatttagctcttaagggtcattttgccaatgtgtaaaacaggggtacttatggctgtcctttttctacctccacagggtatgtacagttccctgaaaatataaatgccttgtaaccacaatattctattataattattgatactgttgttatggtacaaaaaattgataatttctatagctaaatatgatttatgcttctacctggtggtatcaaaaagtaaatgagctaagtcattctttttgtctttaaaaagtccttttatttttttcctatctttccatatttctgttataggtcatctactttcaatttgataaagttttaaaatacaaaaacaataaagaataatattatcaacacctggggacccaaactgaaaattgacattgtcaacattctgatatatttatattttttgtctttatggaaaaaatgaaacagtacagataaaattgaagtgttctttattgtccatgccattgcaatacctcttcctttaataaggaaacactgtcatgaatataatctgtatgctattaatgcattttttatacatagagaatcagtggggtcacatcttttttacctttctcatttccaagtagtttttgagttctattagattaacattagttccagtgaaagggaaagatatatagtctctctttaggaatctaccattctgtgacaaaagagaccccaagtaaagtgtccaaatacactctagtctttagttatatattcacagagtggtggaaggaatgcaccaaatttgttggtctttactagcaaataaagagcttgtcacataaagtaggtacctggttggaaatacagagtgataagaagtccttatgcagtttaagtttatgaagtttacttctatatgacagagataaatttactcaatatttatcacatttaattacagaaatggggttcagcatgtccaccatcattttaagaaagcttcatgtgttttgagccattcattgcaatttaagattaattactggaaaaatagaaaaaaggaataagaattagcgaatcatgaacacgtgtcagcttgggagcacttcacatatactttatgaataccctggtagatatgaaatgcataaaatggaaaagaaattttgcctcatttcaggtggttgtgcgagtgaatgatgtaccagctcattgcccaggttcctgctctttccagtacctccaagggtcaactccctgtgtccattctgtgtggtactccattggtatgatttgtcacttggctctgagatgggcttaagccggagacttgcagtgattttgttagaggccatgtagctggtgatgggtgggtagaagataaattagttcattaggcagaggttgagtgacgtagcagaaagtgtattttttggtccatctaagggatatggtcatgatttgaaatggggagagatggacttttgatgactaaaaatgttttattgtctttgtcctttattttgaaatattatgttcttttaaaaaattgagcagtgatcacttctcactagttagagaaaatttaagatcggggctgtgtactacaataacaaatacagatggccaatatttaattcagcattcagctccttgaattttgggaggggatgggggcagagaaggaacatttgatgatagtgagaggtctctcaaatgaagtaatatcactgagagattattttatttgttttttaatttcttttctcctttaagatggtgacatcaacctaatgatttacattaccggaactggtttctctggtgactcccagttcttgcaggttacagtgaacaaaacgagttgcaaagttattttctcaaaccagaccaatgtagtctgtcagacagatttgctacctgttggaatgcatcggatcttgatgttggtgagaccctctggtcttgccatcagtgccactggagaagacctcttcctaaatgtgaaacctagactggatatggtggagccttccagagctgcggatattggtaatctggggagggtctcacagtatgtctgaccctctgaagctagtgttcttgctgataggaatctagtccttctgtgtaatgaattccatattcactgtgactcactgtcttttgtttactgacataagtatttaaatgagcaacaaacatttgagcccttaaatgaactcacttgccacataaaggattatagtttggctggtggtgtcaggcataattgggtcctacataactttcatacatgtttgatatttcataagtttgtgaactgatgcacactgggatacttggctagcatggaaaactgattgccatttgagtagtgggcaatacagagggtggtgggtcttgtcaacatagccttatgaattgggttagttctatggaaaatcaaatatttctccatgactttctgctttctgagggacacagccagttaaaaacaacccagccagattgcaagaatctcaggaatactgatgcttatgtttgttaacgaataaacattagagcataaagcccttttccttaatgctttggatttttgtcatggtttattctggagtccagaggactgcagcttagaacatatttaaaagcagtgtggtttggccacaaactcattgttcaaaagaacagatttttttctgaccctattttgcctagaagagtgaattatgaggcccaccccaccttgtttctgcacataaaacaaagcaagcataacttgcacttatttctccatgatttaaggaaggtcagatgatatatggagctcagagtgaaagatcatattctgtattaacccagtaattattggtttgagtgtagggcatagtgtagttttctctatagagttataaggggctttgatcttctttcaaagttacctttgctgttcaggccacacataccttcttcagctccctccaccttaaggcaaacaggtgactcagtcatttttgtttcccctagacaaagtgctttgcacaggtaggttggccaactttcccagtttgcttgggactgagggggttcccaggacacaagactcagttttaaaactggaatgcagaactcttagtgctaaaacttggtcctaggaaaattggagtgagttggttaccctatcagaacatgctgttcagtgaagggatttctaggaggattgtacattattttagcaaaagatggaaaactctgagaagggatatgccaagcgggtagaaattatcttttattaagactatggggaaagggagagggagagagagaggctctagctgctgctttccttattactggatttaaactttttctattaattcttcctttgccctgccacctatgagttaatcagtactcactcactcaacactgattggcccatcccatttagccctgtgtgaggtgctgaagaccttggtccttaaagtgtggtcctggacaagcagtatctgtaatacccatgagcttgttagagatgcagagtctcaggctccaccccagaccttctgaattaatctgcattttaacatgtcctcaggcaatctctatgaagagtacagtttgagaaatgatgctctggggtatttaaagagaaccaggctggggcctatcagcaagaaatttacagaatatttgcatatgtaatgaatggatacaataatgtgataaatcaccacctacccatttgcagaagcaaaacccttgaaaggatttttttgaggaaaatcttggctttgctttacatactttcttcattcatttttgtgctgagatagcattgtcttctttaaggtacggactcttgtgtggccatagtctaaactttcaaatgagaatggcaagatatcatcacctcttcaacctttaattgttaccatcaacaataatcataatgacaatttatttagcttttattaccaggcattattaatgctggggatacagtaaataaaaacaaatcctctgttcttggggcagtgatggtaagtgtataggataaaaatcaagaagggaaggggatgaagagggatggagtagatggttgtgatggtatagtcattggcattggaggaatgacatgagtggccttagagaagggagatatgggtgaagtgaaggaatgaattctggggaaatcttggggaagacagttcaagtcagaaggaacatcaaggaacaaaaagtcttgagtcaaagttagactggcttgttccagaatgtcatggaggttgccatggctggagtagattgagtgaggggagagcagtagaagatgacccaaagcaagttatatggccttgggggatatgaatggccctcagctcactcagcttttattctgagtgagatggtggccattggaggatttcaagtgaagtgacatgatctgacttaggctgctgtgtgagaactcacagtagggaggcaaagatggaaccagcaagaccggttaggaggatatgacagacatccaggggagagataatgttggcttggcctagggtagtataccttagaaataggtaggatattttattcttttctttaccccaaggatctcttttttaacttaaaaaattgagatataattcccatatcataaaactcatttttaaaaagtataaacttagcagtcttcagtatattcacaaagttgtatacctcatcaccacctgattcaacaacattttcatcatcatggaaaggaacctgtatacattagtagtcagtcactgtttctccctcttcccaatccctggtaaccacagatatattttctgtctaagtgaatttgcctattttagacatctaatataaataaaataatgcaacatgtgaccttttacatctggcttctctacttggcatgatatttttaaggttcatgtatgttgtaacatgtatcagtactttattcaattttatgactaaacaatattacatggtatggatataccatattttgttttccatccatctcatcatgtgcatttggattgtttccactttttgattattatgaataaggctgctatgaatatttgtgtacaatgatttgcaggaatatatgctttcagttcttttgggtatatacctaaaaatggaattgctgggtcatatggtaactccatgtttaacttcttgaaggattgccaaactgtttccaaaatggctgcataattttacattcctactagcaatataagagggttccaatgtgtgttagtccattcttacactgctataaagaactacctgagaccggaaagtttataaagaaaagaggtgtaattgactcacagttcagcaggctatacaggaggcttgactggggattcctcaggaaacttacagtcatggcagaaggtgaaggggaagcaagcacatcttcacatagtgacaggagagagagagcaaagaggggtacgctatgcacttttaaacaaccaggttttctgagaattcactcactatcacaagaacagcaagggggaaatctgcccccatgatgcaatcatctcccaccaggatccttccccaacattgggaattacaatttgatatatttgggtgaggacgcagagccaaaccatatcacaatatctccacaccctcaccagtgcttgttattattatttttcacagtagccatcttaatgggcatgagatgatacctcattgtgattttgattttcctaatgactaaaaatgttgaatatcttttcatgtgcttattggccatttatacatctttgtagaaatgcttattcaaatcttgccaatttttaaattgagttatttgtcattttattgttgaggtgtaagttcttaaagtattttgggtactaatcacttatcagataaataatttgcaaatattttctcccattgtgtgagttgccttttcactttttaaaaatagtgttatttgaagcacacaaatttttaattttgttgaagtccagtttatatttattgttattgcttgtgcttttggtgtcacatctaagaaactattgcctaatccaatgttacaaagatttatgcctatgttttcctctgagggttttatagttttggctcttagatgtaggtacctgattcattctgagttaatttttgtacatggtatgaggtaggggtctgtattagtttgttagggctgctgcaatcaggtaccacaaactgagtgttttaaacaacaaaaatttattgtcccataattctgggggccagaagtctgagatgaaggtgtcaggagtgttggttccttctgaaccaaactttgaggaagactctgttccatgtctgtctcttaacatctggtgtcttataggcaatctttggtgttccttggctggtagaacaccaccccaatctctgccttcaccttcatatggtatcctccctgtgtcttgcttgtgtccaaatttcccccttgcacacccctgccaacttttttttttttttttgagaccgagtctcattctgttgcccaggctggagtgcagtggtgcgatctcagctcactgcaacctttgcctgccagattcaagcaattctcctgcctcctgagtagctgggactacaggtacaagccaccatgcccagctaattttttgtaattttagtagagacagggtttcaccatgctggccaggctggtctcgaactcctgaccttgtgatctgcctgcctcggcctcccaaagtgttgagattacaggcgtgagccactgcgcctggcccaaattcccctttttataaagacaccagtcatattggattagggcttatcttttttttagtgtgacctcatcttagtttaattacatctgctaagatcccatttctgaataaggtcacatttggagttattgggatctagggtaataacctaaattttggtggggatgtgggagacataattcagccctaaacagggtccaactttgttattttgtatatggagttgtcccattttgtacatgtgcaaaaatattagtagcataatttcctagaagttgaattgctgggtcaagaggttatttgcattaaaaattttgataaatatcaaaagattctctttagaggttgcataatttattgcctaagcaacaatgcatatatgagtgtttatttaccacattttactaacacggtgtgttcccaacccttttgacacttacctattttataggagaagaagaatatttcattgtggttttaatttgtgtttattttattgagagagaaattgaatatcttttcatgtgtttaggggcattgtgtttccttttcagtgaaatgtctgtttatctccttagcccattttttctaatggggttattgttctttcttactgattttaaagagcattttatgtattaaggatatttgccctttattatcatttgtctctttgttttttattttggaaattcgtaaatatttttaatttttacataataaaatatatcttccttttatggcttcaggacttctaaaatacttaggatagactttgcaactctgaaattatatgaaaataaaaattctgccatgtttccttctagtcaaaaaactttctttttaatatttaaatatttgataaattgggaatttattttggtgaagcatataaggtagaaattcaaatttagttttttttcagtgatatttacttattttatttactgaataatttattttgcacttatgtgaaatgtcacttatatcctaatctatagcctcatactgatctgcatttcttctggactatattttattttaccacatagttgataccatagttactgtataagatatggcagaagacctctttacacttctttttgaaattttgttttctggctattcttgtttatttttcattaaacttaagaatcagcttgtctaatttaagtacaaattctgtttatatgtctattgaaattgcatttatgctttaatttataaagatatgtcacctttatggtgttcactctttcgatccatttattttagttttcttatgtaagttttaatccatccattaagttcttcaagagtatttcaaatattttttcaatttttttatcttcttaatttttgttttgaagtttgcttccagatattgtatattttatatcacgattgtatattgctcttagttatgcacttaacttcagggtactagtccaccgagtcacactgtcctcaaaggttttcatcagattttgtagattcccctttctgtccccaacatgcttgaaagtagtcttgcttctgcatccctccccaccctcaagggggggtaaggctgtttggtggcctcactgcctctcttgtatctgggagatggcagaccagaatcattatacattagctagatcaaaggctgctcctccacatggaaacgtgtgccatgatagcagaactggagccaactctcttcttgctaacatctgcagggaagaaatggggatttctgtggttgctctttagtgatcagtagagaaattctgatggcgatgggcagtgatgccactcatttctatattttcacagtgaactgaacctagtatgtgtagtgtcaaaccacaaagctggaagggctaacattattatttaaagatgaggaaaatgttgacccttcagctcagggaccatactgcaatgacctgctaaaagtagctgagcaatctgtggccctgaccctgactctcagccactgttccttccaccatgatgctctgttgcacttggtttcttaggaaaagaatatgttttataggattgcaggaatgatattcaaaatctaggccaggaagagttttcagagactacctcttcagacttgtggcacgattgtgttcctaggttttattcttaaaagacttcaggatgcagtgctacctctctctgccctcctgtcactacttctccctttctatatgatagtttatatatttaactccagtttttttcctgcagtttgagcattgcctttgttttgactaaggagtttcatattttaatttcattttatccatcttgtgcataattaatttttgtctgcctgtatggttggtgatcccatttgaatatgctgtttttgttacaggagggctctgggccaccatccgaggctctagtttggaaggtgttagcctgatattatttggatcttactcgtgtgccatcaatgtcgctacaagcaattcaagcagaattcagtgcaaagttccacccagggtaagtggattcctttcatatctctttctctctgggtgagtgaccactgttaatataacattttcagtgaatcacttcttagaactaaatgaactgatgtaaacttctcattatgatagtatgcttgtagtagttatattgtctgttttgctatgaagtgggaaactgaccccaccaatggagcttgtaattaacatcaattaatttcttaaaaagaagacaaccaggcagttctggtctgtactgtcagtaagtattagtgacacgtaacaaataaatttagctagtgcacattctgggtgttggcttgcaaggcttatatatttcaaagtctcccttctctattaagcaaacaacaaataacttagttttcatcagcaattttgttttctagtatgggtattaattgtagaacttagaaacttctagagtgtgtgatttctaagaaatatcttcttagttattctccattgcttccttttccccttaaaaacaagtccctgacctcttcctttcctttcaattagtgctatatcatggcctattaagggatttgagtctgggtccttccctggtactgttggggagagtcacacgcactgctgccactgaactttctatttagagttgacttaagcagcatcaacattcctagcacacccatgaccccaaaataaagatcccctgggagataagtttcaaaatattctttgatcactagtcctacattttaatctcatctagttccttaaatattatgaaaagctagcttttatatgtacactacattcaattccaatatgtggttgtactctaatttgtttaactattccttattaccagacacttagataatttctaaatgtttcttattgtaaacaacagggctttaatcatcctaataactatgttttgggggtacatttcttttctcaggataaattaatataaattctaaagcttttgatatgtagtatccagttgtctgaaattccctttcaaattatactcccaccatcattgtgcacgtgtgtgatttttgacactttggccaatactgggttatcactttattattttaatatatatttgccattttaatgggtaagacatgtacctcttaatttcttttaccagagaacataaacattaataaaaaataaattttacttttgatccaagtgatagatgcataggttaaaaggaaaatagtaaattatgttttcctgcccctcctcccccttcttcaagtcccccttcctgaaacaacttttaattctttcaaatatagttacaataccatttttatcttaaattaataaaacctgtttatattattctaactatttagatgatgctggcagaaccgggtagtatatttttttcttttatagttcttttttttttttttcccctagagttcctattttattttctaaacatgtcttttgtttgttcgtttgtttgagacagagtttcgcttttgttgcccaggctggagtggtacaatcacggctcactgcaacctccacctcccgggttcaagtgattctcctgcctcagcttcctgagtagcttgaattacaggcatgcaccaccatgcccagctaattttttgtattttagtagaggtggggtttctccatgttggtcaggttggtctcaaattcctgatctcaggtgatccacccgcctcggcctcccaaaatgctgggattacaggtgtgagccactgtgcctggctaacatgtctttcttataagttaaatccaatatcttttaaaaaaagttccatcgtatcagtcattcattttccttgaagctatctctgttctcctgtttcaatctagcctgcttattttctaggtttattctacagattttatcctagtacttactttgattgctttcttgagtagtcactgtttcttgggtttcagatatatatatatatttaaattattatttattttatgagataataaccataagtacatcctatgaaagagtgtgtcatagagaaattttctgagttctcacatgtctgaaagtactctcatacttgatggatagtttagctaggtatagacatttatttgaaattgccatatttttgcagaaacaattggtgtgttaattgcaaataattcttatttaccccttacagcatgtcattatgcatctaacactgcacttgcctactagtccaagcacttatcactctgtgttgtgggtgtgggggcaggatggggagagtgtgcagggttgtagagaagagagagacttggaagtaggaaatataccctttaggaacaactttcttaaaattaacttttaaaactaattctatatggagttctcttcccttaagtcagtcctactttaaaataaaactgaggtttaatttttaaaattgatttttcaggggaaagatggacgcattgtgaatgtgactgtgatcagaggggactattctgcagttcttcccagagcatttacatatgtctcttccttaaatccagttattgtgactctgagcagaaacataagcaatatagcaggtaaaatatgtgatactgcaagatctttttcttcttagagcattggtcctataaaaagggcaatcaatgtcctctgaaatttattgtattttggatttaagttttttcttgaaagctaggagattgcttttttcatcttagccatcatcgaatcaatctcctgatatctacttttccatctgtaaaatggaaccattgtacagatgggaccatttccatcatgaaaaggatgtgggaattcaaaagttacaattcaaaatatgttccttgagcatttagtaagtgtcaataatgatagcataaacataaaatagatgtaatttaatccttgcccctaatttataggattattagcttcaatttacagatcaggaaattaaggaatggagagaataagtaatttatctaagatttgaacacaggtcatctgtttgtatataccaagtacttatctacttgtagttaactgtaaaatactgctttttgacagcaggttctattgtagcagttatttaatatgattagagaataggatgctctgattaacttagaattcttgtttcttgagacattctacgtataaaaataatggattcattagcaccaactacatgaaagaatttttctttgatgattcagaggatatggcaaggtagaattataataatttattatcatgtaattccatatagatttggaagagtagcaggtaacttccctttctggtgaactgaatgccagataacagggtttgtggtagccatatctaagggtttattgtaaaaagaccatcatatttcccaaagaaaaagtctgaactcaatttttctggcactattttcattttccatagctcaagagtacataaataaagagaagtgtcctttagcttccaatattattcagctcagataatgcagaagaagaatttgctgccccaggtgactgaagtgtgtaaaattccttagtggtacagattcttcctgatgaggtagaaaagggagggggagctccatgttatattcagatttcagtgattttggcttttaataaaatttcttatctgtaatgaaaagaataaatacattatatcagtgccaaggaagcatctaggattagcttgacagttgaccaagtgctccaaaagttatgttgttgatacatacaatgcaatgcattcttttcaaaatttatacttgtatttaaatctttctacaagcagaataaaaaggagcatgttataaaatccacgaagtgtcgtagccttttgggaatgcctcttttaagttggagtgctgcacatctccatccaagagatgatgttgatgatgaccgtgaggctgagatgaaatgaaaataaaagcataagagggaccaaggatggggagtgctggtgaatttgatgtgcaggaccattagtgttggtttctgcagtcaggaaaaatggaatctgcatgaatcccagctcaaccacttgttaaaaagaagaactttcaagaaattaaatttaacagagtttgtttgaacaaagaatcatagtaacttgtagaaccagaaaaggttcagagagctccactatgccacatgggcaggcagcatttatagacagaaaatggaagtgaggccagaaacagctccctgtttgccttattggagcatggtctgatcagttggcagcctgtgattaactgaggctcaggtagttgaggctttcagtttatcacaaagttgggttgcagttctttatgtagagactcaaggtacagagacagccttaggccaaacttagttgaacttaccatactccttgggtaagatatttaacttcttttatcttcagttccttcatttgataggtgggaataattctttcaaggtaatcatgaaaataggaaataaagcagatgaaagtacctggtccaggaattgacatagagtaagcaccaataaatctttgttgaagtgaatgccatcattctgccagatattgaatgctttataaacaagccaaagaaaggccctgcctattggtcctattttttttttacttcttcatggcaccccaggatccattagctcaaaagcctgccagtgctaaattcaaacttttacacatccacttgttttcagcgtagccaaaataagcatatttttagccatttaaattcctcttgctttgcatgccccatgaaactgcacccatcagtcagctgtaggtaagaaaaccctggggctataaaataccctaagccgctgatgcctttggagctctctgtcccagaggctacccaccaggctgctgagtgacatcatctggacacagaacccccctctctcatcttcccaccccctcccagttcccttgccttcttccctttctggatggtggcccaatactgttgcctctggaaggtctcatgctgggagacttcctcctcctctgtgaatctgtcaaaataccacccaaataatgcttgttttttgctactgtcacctcgtagtcatgtctttttctttgatcagccctgaaatcccttgaactcactacactgaagcttcagacttcccagtagagattgggaagacatgcggtcaagagaatggggaacgaggaagaaaatgaagttaattaaggcctttttgtgtgctatatcatgccagatactttcccaggatatctaacaaaccacatgggatgggctttattaaccatgttattgatgaaaaatccaaggctttgagagccgtaagtaaatcacccaaagtcacagaggtagtaaaatggcagatcaaggatttgaatgcagattcatagtcttcccaccacaccacatccctcttctttgacttttctctttcaagcaacctctttttcctcttcatctaattggccgtggcatcccatagataccagctctgcagtagtcctcaaatgttacaggctaaaggagctagagatgctttagcccaagccatgtttcagtggccacactgggacacaggaaaggtaaggacatttatttccactcctgctgttgcccacttgatttggtctacttgattaagactacaattgtctgcagattggatttctcctcccctatcttttcaatttatcttaaagactggaagaacagttttaatcatatcttttccttgcttacaagtctttggcggtcactgccgtccactgagttaagcagacatccctctggcttggctttcttggtctttggccctaggactaccatcaacttggcttatccccaaaacagaaccctacctgtgccttccagaacatcacccaattctctttttcctctccaagccactgggtgattaagtgagaaattgctatgaaaggctttggataaaaccgtgaaatttctagaaataaatgataagcccccttttctctatgactttctttttggatttatctttcaagctccaattcaactctcatcttgcccattccatctttcctgatattcataatgttgctctgatttgagcaatcccagtgcttaatttccacctctcttgtagtatatcttttattgaagcaattttgtcacctattttactaccgttgaggcttctttgagggcagagtctgtgtttaacttattttgtgccccttgcagcatcttccttatggtactcaataaatatttgagttaaaagaaattgcatgaaagtgttcatagtgtacacattttaatagagttgctaattaaactaaaaggacactgaaatgcaagacaaaagactgggctcaggtcttgacctttttttttcttttttagtaattattaatagctatgaggctgtggctgctgagcttagtttcctcaaatgcaaaataccagtcatattaattgccccatataaatcatcaggatagtgtgtggaccaagtgggataacatacgtgaaagtactctgtcagttatgagctactaaactcacatacagcattactgtaaggttcagtgcacactcaaatatagcttcagacttctaccagtagaaaagtggaggttaagcaaccaatatgtggtgctctttgctggttataaagaccgttagctctgcaaacttcttgatttgcctttgcatggaaataagttagtgtctcttgaatacaattgtcctgccaatttttctttttatactattgaggttacagaccatatctctgttaaaagagttgttaagccaggcaaggtggcttacccctgtaatcccagccctgtgggaggccaaggcaggcagattggttgagcccaagaggttgagaccagcttgggcaacatgtcaaaaccctgtctctgcaaaaaatacaaaaattagctgggtgtggtggcacatgcctgtaatcccagctgcttgggaggctgagttgggaggattgcttgagccctggaggttgaggctgcagtgagacaagattgcaccacagcactcctgggtgacagaatgagacctgtctcaaaaaaaaaaaaaaatagttgttagaagtttcttgaaaaatttaggttggtatcgtaactcttaagagtattatgcataggggtgactgtgaatttaatccaaaaagacagttttagaattgaatagatggttgagcccacaaaccccacatgtcagaggctattggattcttctcaacacaggcggtgagaccctggtcattggagtggcgaggctgatgaactatacggatttggatgtggaagtccacgtccaggatgccttggctccggttcacacacagtcggcttggggcctggaggtggcactgcccccactgccagctggtctccacagaatttccgtctctatcaatggggtcagcattcactcacaagggtgaggtgaccacttgcattaattttggatttgtttgatggtctagcattcagctaggtaattctaattttgagttaggtattttctttttcccttggaagttagaggttaaagacatgaacatcataacattggaacaaatcttagagaacttacagacagtttgctcttctcctcaaaatacatatggctcttctggcttactctttcttatctctctctgtcagttatttcctaaacatctgcctatcttctgtagggttgatctccacatccagtacctcacagaagttttcagcatcgagccttgctgtgggtccctgctgggtgagtggctcttatgtgactgttatcaattatccagcaattctatttgctggatattcagattttgtttctggattaatttgccagtgaggtcagagagaggggaaacaggagagaaactttcctcgggctccaggaactgaggggtgtttttaaaagggtgttaaaacttggtgattcatttgctcaggaaattaaggaatttttatgacaaggagatgtgcctgcttttcttttcttttttttttctttttcttcttctccttcttcttcttcttctttttttttttttttttgagacggagtttcgctcttgttgcccagtctggagtgcaatggtgctgacttggctcactgcaatgtctgcctcccgggttcaagtaattatccagcctcagtctcctaagtagctggaattacaggtgccctccatcatgcctggctaatttttctatttttagtagagatggggtttcaccatgttggccaggctggtcttgaactccttacctcaggtgatctgcccacctcggcctcctaaagtgctgggattacaggcatgagccaccgtgcccagccgagatgtgcctgcttttctaatgaaaagaggatgaaacgtctgatgggtgacactctagagtggatatgagaaaaacaagggcaacatgtcctgcattcgccatttagatgctgtgcatgcaaggaggggaggattgaatctgcgggtcttcactttccatgagagagacagatgaaagactcagaaatagaaacacacatgctgatatgggagatggaagaacaagacaaatagaccaatctctaaaactattttcagaaagaatggaaaacaatctagtggcatgtcaataatagttgtgatcatgtgtaagatagcacattatcctttttgggtatagtaaaatcctcttaaaagccacgttgtacagtttggttatgctgtgggtcatgttgctccaatcctgtcctgaagatggggtttgatctttggtggcctctctactggagagtaaggcaaagattctatgaaggtagcagcaaattcaccagcaagattcaatgacttttaatgtctctcacgtatatggaatatagaatatatggtacaataaatagaatatattagaatgtataatatatggaatattggaatattatatagaacaatataaatgatagaagacttcaatgaatttgatttttcattagcatataagttgaatgtatacaggacaatgtacaaatagtctatatatagcatacaggataatatttccaataatataatacatgataagaagactaagaaatttgatttttcattagtgtgtaagttgattaaagtggtggcttctgggatatacaaaggtacttgaaaagtttgtgttgaagacgtccttcctatataacaatttgtattattttactgttatgtgaatttaccacatctgactcctgtctaaataatcacaaatttagctttggtgggggtgagaaaaaataattgaggtttcactaacacatgccctaccttccacttaattgacctaggacttccacaggtgctatgaattcttagttcagaatatcagctataatattttgctttccgtattcatactttaggagggaccatcctcagcatctcaggaataggcttcagcagggacccagctttggtttgggtacttgtgggcaatcggtcctgtgacattgtgaacttaacggaggcgagcatctggtgtgaaaccctgccagccccccagatacccgatgcgggcgctcccactgttccagctgccgtggaggtctgggctggcaacaggttcttcgcccgtggtccttcaccaagcttggtggggaaaggcttcaccttcatgtatgaagcggcagcaacaccagtagtcactgccatgcaaggagaaatcacaaatagcagcctgagcctgcatgtgggaggaagtaacctctccaactcagtcatccttctggggaacctgaactgtgatgttgagacacagtccttccagggcaacgtgagcctgtctggatgctccatccctcttcacagtctggaggctggcatctatcctctccaagtacgtcagaagcagatgggatttgctaatatgtctgtggtgctccagcaatttgcagtgatgcctcggataatggccatcttcccatcgcagggttcggcatgtggtgggaccatacttactgtgagggggttgcttcttaactctagaaggaggtcagttcgggttgacctctcgggtccttttacttgtgtgattttgagtttgggagaccacaccattctctgccaggttagcctggagggtgaccccttgcctggagcttccttctccctgaacgtcacagtcctggtcaatgggctaaccagcgagtgtcaggggaattgcactcttttcataagggaagaggcaagtcctgtcatggatgccttgtccacaaacaccagtgggtctctgaccactgtgctgattaggggtcagaggttagccaccacagctgatgagccgatggtatttgtggatgatcaacttccttgcaatgtaactttttttaatgcaagccacgttgtgtgccagacaagagacttggccccaggaccccactacctgtcagttttttatacaagaaatgggtatgcttgttctggtaatgtttccagacacttctacattatgccccaagtgtttcattattttcctaagaatttcagcttacatggtggaagcctcttgaccatagagggcacaggcctgagaggacagaacaccacgtcagtctatattgaccagcagacctgcctgacggtgaacatcggtgctgagctcatccggtgcattgttcccacagggaatggctctgttgccctggaaatagaggtagatggactttggtatcacataggagtcattggttataacaaggcctttaccccagaattgatctctatttctcagagcgatgacatcttaacctttgcagtggcccagatctcaggagctgcaaacattgacatttttataggaatgtcaccctgtgtgggtgtctctggtaaccacaccgttcttcagtgcgtggtcccttcccttccggccggggagtaccacgtcagaggctatgactgcatcagagggtgggcctcatctgccctggtgttcacctcaagagttattattacagcagtgacggagaacttcggtaagtcaagcaaataagacagcacactttctttatgtaaatgaattggtagctcctttcacttctggaaagtagaaaattaacacaatctgcctgatggaaggaaagagaagcccactggcttcttacaatcccaattccttcctgaggcttgtctttgttatgctctgtttatgaagattttttttatttttatcaaggaaactgtgcatattctctaaatgtttgattgtattttaatttgatgcattaactggatttgtattttaaattaaataacaccatttgtaagagctcataatttgatcatttaagaacgtaaatgccttcacctagttttagaccctatctgccaatttgcgttgtttaaaatttattaagtatgattaaatttttatcattttgtaatatttcacaggtggactcatatttcaacaataataagccaaatgcacagaacaattaaattggttggactgttttctccgtttagatataccaaaaattgcctagcctttccctccagtgaagaaaagctttcaatttctattcacttaaagccttgttgcacttgagatagttcaaatttggttgtgatttagaaagtaaggaaaaaaactatagaaacagaatcttagactgttggagtactaactaagacatttcttagaaaaaatttggtctcagcttggtggaacactgtggggactaggatttggctctagtctatcactaattttgctaatttatgcttgacttttctgagactcagcttccttatttgataaaggcactactccctaagattccatgtttttttatgatggaagagcagggaaataagaaatgcatcttaaaccaaaagcattatttttgagttagtcaagtggctaagtaccacctagacctggtatgaaggcagtagtgaggggaactctgtatctcagtgtaaactagaaatgtggactggttttactcatacaaatgtcccaaaacatgtacagttattgcatcactattaacaatagcaaaagaggagaaaaaatggaaatttcaataaataggaaaattgtcaaataaattgtagcagggccctataatggaattctaagtagctactaaaatgaactggatccatagagttttgaaaaaacatctatgctatactttgaagcaaaaaagcaagttccagaataatatggatagaataatgctttgaatcagaaacatagatgcttaaaaattctggaaggagccataagaaactctatacctgggtacctccggggagggagtcagatggttgggggaatttttattttcattttatggctctttgaataaaaagtttaaaaactataaataagcattaattttccatataaaaattgttacattaaaaaaaaacctctttaacacaataggatattgaatgtgattggagtcagacaaggccagagcctaagtggagaggaaactgaggccagcagccacctcaagccagttgtgcggattctgaggatgtgaaaagaagaatgggtagtgaggaagcaaatgtttgaattttgagttgagtaaagaagggagatttgcctgtatgatcaagaacttgtacctttgtctttaaaggctgcctgggtggaaggctggtgcatgtgtttggagcgggattttctccagggaatgtctcagctgctgtgtgtggtgctccctgccgagtcctggctaatgctacagtgtctgccttcagctgcttggttctgcccctggatggtgagtaaagatgccacacacatatattttaaagcatatatatggaaatgatattctttggttaattctatttttgtgattaatgctgtactgactactaatttctctatgtgtgcctaggaaaagaatttctctactcctcatctaaaatgatagttagaatctgaggccacctgttaaaatgattcatcataacttttgtcatattaatatgtcaatgttagatgaatattgaaacacttatcacctgtgttcttaactgcagtcttaggatgacagaggaagtaattctgaattctgaatattagtttcaatgacagctataggagtcatggaggaaacaagctcttggctttgttctgaggtgaggttgctgaagacatctgcttattggaggtaccagtaaagggatggagattttcaagctggatatcacttgaaaattagctttgtgtgttcagttttcggtttcttattataggcaaaagagccaacactcatgttgtcttcttgttttgcaatactcacataattacttatttcttattcagtaaaacaccacaattgctcactactttaagctgcgtagtgatcatataaattgtggtatgagaagccgtgtctttgtggggaaagagatgagagagtaagttgcaaagcttggggattcacaacacatggtaataccccactgagcttcaggaaataaagtcaaaaggaagaaattactgttattactacaggaccttactacatttgagatagctcacatttagccaggtgattaccttatttgcctaatcataaatcttgtacctgtgcacttaaccgtttacatacctcctttctgtgtagtgtttaagttttattcctaatttatttgtctgcaacttgaatgtgggctaaagatttacaaaatgataaaagcaccacatcatctgagcttggatgagaatttaatgatggataatgctattgtgatggaaatttgtgctgtgttgtcttatacaaagaggagaaggaggggaaggaggagggggaagagggaagaggaagaagaaggggaggagaaaaaaatttttgttaaaatgctagaaattgagtttcctattatcatcatgtatataaacacattatggaagagagatagagtccacaatgggaaatttaagatacaatagaagattgaagttcaaaacattgtctgattcactgctctacctcctctgctaggaacagtgttgcagagggtatgtgcaaaattagtgcttggtgaggaataaatgagagatagcataaacagaaagctaagactgcacatttataggctctaatttttaactaatactgctacattttttaaaaaagctttcatatatacactgctcaaattaatatacttttaaaagccccgtgttattatttcaaaacacttaatttcaactagtataagataaaaatcaatgatgtttcaggatcaggtaagttgtgatattttaagttttataacttcttggggaagaataataaaataattattgtgtttagaaagatttagaaaagaactcaacattccatgattttttaaagaggaaaattagttggaaactgtaactatttatatggccactaggtgtcaccaaacactcattgattgtgcaaggcacacatttactctagaggaatgcataatttaactaattttcctttcataaaaaagtcttttaaaagactttcaatcacaatgtctaaagattgagaggaaattgtgagagccaactccagaggtttcttacttaagatccaagatgggatttggggattctgttaacccgctgaaactggatgaagcattttgagtgtatgactgtgtattttttttttttccctaggaagtaggtctataatggacatcaaatgtcaaaggggataggtcttagacattactagaaactactactaatttctccattttcagacaggattgagtacaaccaagttagctaaaaatcacttgtatttttaaagatttttcaggggagaatttcccagcagcaacccttacaagtgtttcgcagttgctcttttcagagaaatccatcctctgcctaatggatgctcccctactctaattttttcaaccttaatcagcgggtggttctttggaaagtggagtattcttagttcctctatggcagcagttctggaagtgtgcttcccagagcagtagctgcaagggcctcacccgggagcttgttagaaatgtgaattcttgggccctactgaatcagaaactttccaagtaaacattttagtatctcacttttcagccctctctgaaatcctatattctttcctaatttgaagccccaaatgaggaagctgttctatacaagcaagttctggccaaattgggtagcatcgtaagatgcctgtgtatcgtctgatcccatgtttgtttgtacaattatactgcagtcttgctggttaataagctttctgttacctactgttatcccaaggggtgtgtgtgtgcacgcacgcatttctaccatggctgtgcacagctggactttcctcatatttatatgatttctttttttcttttgtagtttactgtcttactcttttcatttgttcttttgtttatttctgttaacttctctcatttaccaaggtcgctttgaattctgacccgtgctttgagtttttttcttcagtttgactttgtaccatagagtgatgtttcacattccaggttacagataatgaccctgaactcaaacgttcttaattattgttttgtttatgcctgtgccacagaactaatatgttttctttacatgtgtggggcagggggagttaaagcagggggctctacaaatgtgcttttgctattttggaggtcacccatttttaccatccccacaaactgtacttctaaccataggagaaatttcctttttcttgtaatgagttgccaaaacatcctgttaggtgaaactaatactttgtgtttgtttaaaatgagcaaaatctttgatctttggctttcttgcatttataccttgaattataccacatgacattttcatggaaactttaacttttccataaggcatggaaagctaaagtgattaaggtcacgcagctatttagtggcagaactttgagtaaaacccatagattttgatccccagccctgggtgattttcataatcctgcttgtcaatttgcatctacttaatcacctttaatgaattcattattttataggtgtggagcttgtttttatttgccttagggcttactaactggaaagttcttatgttttgtctgttcatacaagagtcctactgtcagtcatttttattgctctaattcattcaaaacacattcacagccaacctcctaggtgccaggtgctttagaatataacagcaacaatagtactatttgggcatgattgcataactacaaaccctcccccacgtacttatctcatgtaacccttgccacagcactgtaatgaggcggggaagcacaggtctaagcccacggcccttgataacctctgttgcattacccacatgggcaggcttgctgcagaggaagcaggctacagagatttttttaaattttccctctttattaaggttttcagacagagctgctcctaaaccatctcatgtggagctttgttcatcttctagttaaagatcattcccagtctgcctcatgatgctttttatatgtgggtcatgactcagaaaaaaatggcctgagagtcagcatgcttcaaatacttgctttttatctctataacatgctaatgtttataattatgtgaaaatcaagaaattcataaacttatccaagtcaataagacaaacaacccaatagaaaaatgggcaaatgagagaaacaggaatttcacagaagagaaaacatgagttgttaccaaacataaaaaagttggtcaacttggccaggcacggtggctcatgcctgtaatcctagcactttttgaggctgaggcaggtggattgccagagctcaggaattcaagatcagcctgggcaacatggtgaaaccctctctctgctaaaatacaaaagatcatccggggtgtggtggtgtgcacctgtagtcccagctactcaggaggctgaggcaggggaattgcttgaacccgggaggcggaagttgcagtgaggtgaaattgtgccacaagcctgggcaacacagcgaaactctgtctcaaaaaataataataataataataattggtcaacctaaaagtaatgattgaaatgcagattaagacgacagtgaaatgccattttacacacctgattggcaaaaattaaaagtctgataatttcaagtgcttgtaattatatggagtaatgggaacttacaaatatggctggtaggaatacaaaatggcacaactactttggaaaacaatatggcactatcttgtaaagctgaacttgtacctactctttgaataagaaattttcttgataggcatgcaccctagatgaaattttgtacgtttttagtagcaaaagctaggaaataccaaaaagttcattgataagagaatagataaatttattgtggtagtttcatgcaatacaatattgaacagcagtgaaaatgtattaacaatagttatatgtagtaatgtggataaatcttgaaaatataatatggaatgaaaaaatcagacccaagaatattttatcatgtatcatattttataaagttcaaaaacaaggaaaactcaatctcttgtttaggaatacaaatgtttgtgataaaactatttaaaaaatgccaagtggttatttctgagaatgaggaggaaagggacgaacttggggagaaacacacagatttaagtgtattataagtgttttatatcttatgttggctgggaaattcacttgagttttttttatgatgattattcatattttacaaaaatgatacttgtatttttctgtgtacattacacatatacaatacattttaaaaaaagtaaactgctaacttcatattcctattggtcaaaggaggacacaggaacttcatttgtgaaaccgactagaggccttaggttctctctgtggttctttcctaatggtgactgtttcctgcagtgtccttggccttcctgtgtggcctgaagcgtgaggaggacagctgtgaggctgccagacacacctatgtgcagtgtgatttgacagttgccatggcgacagagcaactgcttgaatcgtggccttacctctacatttgcgaggaaagttcccaatgcctctttgtgccagatcattgggcagagtcaatgtttccatcattctcgggcctctttatcaggtaactttaccttctccctccctgaacttccccacaaatgcttggccaatggaccgatggagccatcagagagtgtaggctgggtggatgtggcctggcagccgtggtaagggctacaactctcttggaggggccattccattgtggattccagccagcctgcatatcaaagcatctcctgtctttttcaactgtttaagagaacatctgaaaaatctgcccagtaaacagctcgctttgttcttgcttagattttaatatttatcttccgatccaaagcaacatctggtgaatgccaatggggaaaaagattagacgttatgaaaaacagaaggctttttccccgctttcctttttcttttctttccaaacagattcacaagtatgaaaaaaagccatagagaaatccagcagattgtacaatgtttattcaaaagaaggagggttgcataggcggaattactgtagatctaggatttagaagccataagcgtataagcatttttttaacttaaaaaagaggctgacaaataaacaccacaactttccaagttaaccccccttttctaaacaaataaaaaagaagtgtgaccatgctagtaattctggattgctttcatttcagcaaggagttcctttcctatacagggcagtgtctcatgactgaacattgtcatgtaaacttctttatgtcttacgtagatagagtggctacctttgattatctaatgaaggtctcttttctttttcttttctttttttttttttttttttgagacagagtcttgttctgtcgccaaggctggagtgcaatggcatgatctcggttcattgcaacctctgcctcccaggttcaaggtactctcatgcctcagcctccccagtagctgggattgcaggtatataccaccacgcccagctaatttttgtatttttagtaaagacagggtttcatcatgttggccaagctggtctcaaactcctgagctcaagcaatccacccgacttggtctcccaaagtgctaggattataggcatgagccaccgtgccccgcctcttttcttataaaatatgaaactaaacaagaccacttccccacggtgaaagagataaccagctcttttcatggcatctgactttgtgatgtcctgagacagtttgtgttttagtgtgaatttggcaccagaggtttaggtttagctggaggaaaagaggaacctccttggctggttgctttctaaaagggcaagaagaactctgtttagctcacacaggaaatggagtgctgggtattgtactcaggtgagactggatttcagaacttactgatgctggacaccaggaagtacatgtcagtaggtcctggctccattgaattcagggacttcatctgaatccccaaaactcttctttggggttcttccatgctcttcctcttcattgtatgggatggctgaagcaactgagcctcagaacgcattgacagtatagctttacctatgaatatcatttcaatagtgctgctcaatgttctggctattgcagtaggcaaaagtgggtatgttttcttttttcttttttttttgagactgagtcttgctctgttgcccaggctggagtgcagtggcaagatctcggttcactgcaagctctgcctcccgggttcaagccattctcctgcctcagcttcctgagtagctgggactacaggtgctcaccaccacgcccggctaattttttgtatttttagtagagatggggtttcactgtgttagccaggatggtctcgatctcctgacctcatgatctgcccacctcagcctcccaaagtgctgggattacaggcgtgagccactgcactcggccaaaagtgggtatgttttcttgagtaagaattataataagtgccctatgatttaaacaaacaaagtttaatggggatgagagtgggggaaactggcagcggtctttttgccagtgggaaggtaaggtaatgcaatcgtcagaggacaatttgccgattcacgaataaccttaaattctttatactctgtgacccagcaatttctcttttaggattttaagaaagtagatagaaatgtgtaatatttataacaatcatgttctttgaagtttcaggtatcaaaaaaaatttgcaatgaaacaagttttagtaataaagaatgtatccaaatgatatgatactaagtcacctttaaaaattaggatgtagaatatttaaccagacagggaaatatttataatatattgagaagtgaaaatcacaggtctcaaaagagtatatcaatttgatcctactgttgtatatagtgtatatgtttgtacacacataggttactagagaaaaggctggaaagatgtatccaagaatgttgatggtgcctatctctaggtggttggagtactgaccatatttattttcttcattgagtttttatgtgtttttccagggaacacaatgctgtatctccctgccatccacaacatctatggggtttgatgtcatttggcaaagggagaagtgcatctgtggcaaaaattataccctgtctattcgtccgtccatccatccatccatccatccatccatccatccatgatccatccatctatccagtatattcatccatccatccatccatccatccatccatccatccatccatccatccatccatccatccatctatccagtatattcatccatccatccatctatccatccatccatcaatccattcatccatccatgatccatccatttatccagtgtattcatccatccatccacccatccattcatccatccatccatgatccatctgtttatccagtatattcatccatccatccatctctccatccatccatccatccatccatccatgatccatccatctatccagtattgatcacatccctactctgttctaggtgttgtgacaggtactggtggctcattcgtggatgtcatgaaagtccctgccccttaagggtagagaagaaagtcagataataaacaggatgatcacgtgttgtgataagtgctataaagtgatagaaaaataaaggggggctactttagagagtgtactcagaggaggcttctctgaagaagtcttttatgttacgaagagaagcaggtgtctttatggagggtgaggcagtggcagcagcaaatgcaaaagaactgtcgagttttatgactgttcagaggctaggagggtgggagtagactgagaaggaggaaaagtggccccagatgagctcggagagatatgtaaggcattgaaggccaaagtaaagagtttggattctcttctaagtgaagattaagtaatttcccaaagtcacacagtcaagccatggcagtgttgagactggaactcaaggcttctgatgcagtgtgcttagtgcaatgctgtgctggcagcttcagtgtgagagccctggctgagctttgtgggttcagtgaggtttcagagccacaggaagcaacttcaggggaagtgagggagagaaaatgcctgcaaattgttttccctacctatcctaaggagcacagccaaggttacttgcttactttaggatctaatcagatcaactaaagaacaatagtttgggagtcaggagtcttagatactagaacaatctttgccaccatttttacccaatattttaaaccatatcccccaaagtaaatatgtgtgtgtgtgtgcagtgtgtatgcatgtatatctgtatctgtatctgtacatatattgatctctctgtctatatatgcttatgttgcatatatatatgcttatatttatatttaaatatggccaactgtgcttcttaattcataggattattgtggaagaaaccatggaagagtagctagctatttagaagctttgaaattttgtaaatgttaacctattttggatatcctggtgtctcagctaattttggtgatggctttttaatgaaaaacatttctagcaaggtagttacaaatatggaaaaaagtgtgagctgaagctggtaaacaaaaagtccaagctaacagaaaggggtttaattctcttcagagcaagaataacatgcttagtgaaaacagtgtgttcctaacaggcaaacagagggtagagtgactcagcccattttacttgtacctctgccagcgaagagtcaggaaagggcataagaaggtttatgaggcaagtggaagcccaaggccaagaaaggatgtagaaggaagttggtcactactttccttgagttcaagtctgtagtctcagatcattcataaactgggtacaaaaaactcactcttatgattgaggacctattgctggcaatgaaccatgagaaggggtcacataacagaggtgatgggcagatattctatgaacctaaaaaaaagaggaggaattctggaaatttagacaactaagcttggtgttatccctgacaaaattctagaatgaactattcatcagatagtttgtgagccttcagaaatgaaagtagccatctggaaaccgatttacgaagaatgtgatggtgtgggaaaccaacttcatttcctttctgataggtttataagtgacttatgatataaacatagcgggagaccttcacaaactattccaaccacttctccacccccagtaacaaaaaaaggttctaggtgcaaagcccaaagtggcctgatgcaagcctcaagttgctctgaagtgaggtgttttaaaagtctgcgtgaattttgcatttgattccatcacatttctgtattgatctaaatattacattgcattttaatttaaaagttaaattactttgcttttcctttctgaatcttggaatacgactgatgctccaggagcaaaggatggatttatcctgtgactttgtctgccctgtggacgaaggatcagcgaatggatttacagctagatagcaggctacagattcaaaacaaatttgagcaacaggtctaaaccagtgagagatatgtaacaataataaatgtaaatttccacatttacatttttaacaataatgctactaaaactactacctccaacagctataacgcgagctgcctttattggattcgtattgtgtgccaggttccatgctaatctatttatatgcttcattttgctcagtttcttcaacacctccacaaaataggtacttgattattggcaactccattttataaatgtggaaaccaaagcttagtgaagtaatgtcttcaatgtcatgtagatggtaaccatctgccccgggattcagatccagctgatctgcttctgagcctaagctttacatgccagtgctcctcagaaaatcatttgaacaaacacaccatggtgaaatcctcagaaagctgcagctctgagactttgaattgaccactatctaagtataagcacggtggccttcaaaatgaacacagtatcaggtaccgtgagaaggaggctcagataaaggcagaccggagtcccagtggtcagcccaaacaatctgcgttcagatatgggtggcatgatgttaacatattgacagtctacattattaggtctaaaggactgtgggtttggaagtcatgtcttaggtagatacagagtggagaatattttagcatgaagaagcgaagattaagtggtgagatgtactagttatcctgctcattatttctagaaaattgtggaagaaaacattttgacattgatttgaaaaaagatggtagggtttgacatggtgtacagtttctcaagtggtgacctttttgcccttctctccacccttcctggtcttcccatgggatctgccatcttcctggctgatgttcaatcagcatttcaaaacttgagagcactgctctgggaaacaggaccatctggttttgacctcggagctaccgtagttctgtgtttgactttctgagaatctcttgatctctttgggttacactttttacacctcttcctaatttataggctgaaatgagatcatacatgtgaaattgttgacaaatatgaaacatcatgcattattattactgataatttttgagttagttgcaaaaatgcctacagccaggatgattcttgaataaatatcacacctgttgaggatgacacccttcactatccatgtcctcacctctagatggcatatttttagactttctgtaatgctacactgctgttttttattttaaatccagtctggcttctccccttaaagcaagaggacttttaaagcgagtggctggtagtataactggcacatatattgaatctccttagtctgggctgttaagtaagtttaattaatttactaagttaatgttccactgctagcaacagagcctcattgccatcagctgggaagggggaattgcaagcctaaatgagctcattttttcacagttggaattagggaccagttagccagttgtgtgggttttccaatttctccatctgccctagggggattcaggcaattactcccccaacactaagtatgagtaagagcaggaagagggaaggggaaaagaaaaaaaataaaaacaaaaactctcccagacgtttgttaccctttttggaactggaagtattgtccctgcatttcttgttaagctgggctaggagtagcttttgctaatgtttttaatagattcggaaaagagaaaggcctcagtgaaagatatttaccatggtgcattttcattgcagggtgtgcagataaaaggaaaaacaaataaacaataaaagaatggaaacaaaattacagaaatttgcaaaatttgacaaatggtggcctgtagttgccacaagctaatggcttgcaatgattaataagagtaaaaataattgcatttcattaagattgatgacaccccatttaacctcccctctcgtttcagccctaaattggaaagagatgaagttctcatctataatagctcctgtaacattaccatggaaactgaggcagagatggagtgtgagacgcccaatcagccaattaccgtcaagattactgagatacggaaacgctggggccagaacactcaggtataatcaaatcttttttacagactgattcaaacagctcaaattaaatttgtaatattgtgtacattaaaaaaacaatttagtccaaatggcagcgatatataatattaaatgtgctcaaactttgagaagctggtctaatgcacaatatctgaattcatagttaactctggttaatcatatattttctcaaaaataaatgagtgttgcccgggctctttcaaagcaaattctgagcagataatctgcttggcattttgtcctgatttctgtatgcatgtttgaaaggggctctctgtggtttatttcttcacaaaataaatggcctacgatttaaccagatcctactggaaggcttccaaatcactcagccgtcctcagcttggcgggacagcaatgtctgcaggtccattcggttcatctctgtgccatgggggagcagagtggaaacttcagcttctgaggggattacgtggacatcagaaacgaaaaggacctcagggtcattcggtctagcctctctgcctcaattcacccattttgaaattgtctaaaccactccctccaagtggctcttctaaaagcatgtttgtaagtctccagagaggaattccacagccttccccgggaatttgcgagaattgcaatcagaggctcagggctctttggaaatggatcagataatcttttacagctccccaggcttctcacggcacaaagataaaaaataatatttattgagcacctactcccttaggtgcctttctctttatgaaagcagttctcagatttttctctttttgtctcttttatttggaacaaacatttattgagtgcctattatgtggcactcgccgtaccagattctcttgtgaatgctgctgcagtcaaactgtcctaatccaaaagtcagcttcctggcttcaaaatgtgtgttcttctataacttttgtactggtgctgaaaatgtatgcgatggcaaacaacattttttttctgtccttactaaactgttccgtgcctacctttccatgctcctgggtcctcaactgtccactctgtggcctctgcaggcttctccctcaccttgaccttcccttcaggtgatagcctggggctgtcacttctcgcttcatcgtgtcccccacaaacacctcttcctttcaatttactaccaattttaattctctccagagccgctgacccccagtggcacttccactttattctgcgcctgtttctcagcagtcagctgtcagtgacatttcaaaagtgtattgtagtgcgctgagactgctgtgtgacactgggtgatctttaagcctctctgggcctcagtttctgctgggtgcgtaataacctggtgttgttgggatgcttagatgtgcaaatgcttgtgaaagagggagaggcaggctgacctagtgtttaagtgcatggactttggagctagactgcccgggtttgaatacatcacttgcttcttgggggactttaggcaggttctttaaaccctctgtacttcagttttctcatctgtaaagtagggtcaataatagttcccacttcatagggttggtgtgcgccactgagagctgcatctcacacatggtaaatgtccaatgttagccattattggcagtgctagttcactagtcatagtgctagaaaatgatatgaatttatttttctatagtgcttgctgctttgaccagatcatttcacttcttagatttatttaatttcccatcatctcaaagtctaattttgattttttttaggcttaaatgcctcactcatttaaaaatccttatgtgacatacatttgagttccaaccatgttcaaggttctctaccatgttctgaaggagatttaaaaaatatatggaaagagaccccacttttaagagatatttgggaagtgaggccttatgtggaagtagttaagtttcaaaaaagggtacatagagtcaattcatcacagctgggtggaatgttggatgccatacagaccggccagttcatttcagagatgagttaactgagattcataatgaggggtggttgataaaggtcacaccggtagttatctggcctcataacccatgtggctatagtcattgtgggggaagtaagccatttaatctttaggaactaggaatgtgtctagtgccagtgtgtagggaactccagtcctgagggggtaaagaggagatgggtaccatcattgtaggtttcagatgtgatgtgttacactcaagtgttagtgataatgtcatagtttcgaacagtctattgggagcagggccctatcaagtagccagaagcacacgagggaacaatggcagggatttatggcaaactcagtctgaacttatggctgcgtttagctccaatgggaccctaaagaatagaacaagagtctcaggcacacgtcctgtcgcatcgactggatcaatatggtggaagttaggaaataactatggctggcacacagtggcctggagtccagaaaaacaacattctgtataatgggaaaattgttaattctagattctactcttgttagggtggtttggtttgatttaggaactggatataatgaagtctataggtggagggcttataactaagtgactatgtaatttatcacccaaaccaggatgcttttgagagtgcaaggttcacaatgaatgattatgctgggatagtatgtcacccttgttggggtgtgtgattaccctacctgggcttgggaacagaacaacttgtcatacatatgtgatacatggttaccctacccatgttgggatgtacaatttccctaccttggcctgggaaaaacatgccaccagtattatgatgcatggttatctgggcgtggggaagaccagcaccaacaagtgcttaatcaggactacaatccaggtccctgttccaaattcaagaattccttgtgtgggaaccttggaacactagaaaaggaaacatttctacactgctggtgggaatgtaaactagtacaatcactatggataacagtgtggagattccttaaagaactaaaagtagactaccatttgatccagcaatcccattactgggtatctagccagagaaaaagaagttattatacaaaaaagatacttgcacacgcatgtttatagcagcacaattcgcaattgtaaaaacatgaaaccagcccaaatgcccatcaggaaacgagtcaataaagaaattatggtatgtatatataatggaatactactcagctataaaaaggaacaaattaatggcatttgtagcaacctggatggaactggagacgattattctaagtgaagtaactcaggaatggtaaaccaaatatcgtatgttcttactcataagtgggagctaagctatgaagatgcaaaggcataagaatgatacaatggactttggggactcaggggaaagggtgggaggtgggtgagggataaaatactacaaattgggttcagtgtatactgctccggtgatggatgcaccaaaatctcacaaatcaccactaaagaacttactcatgtaaccaaatgccatctgttcccccaaaacctacggaaataaaaaattaaaaaaatatatttttcagccaggtgtggtggctcatgcctgtaatcccagcactttgggatgccaaggtgggtggatcacctgaggtcaggagttcgagacaagcctggccaacatggtgaaaccccatctctactaaaaatacaaaaatgagccgagcatggtggcgggtacctgtagtcccagctacttgggaggctgagacaggggaattgcttgaaccctggaggcggatgttgcagcaagccaggattttgcgaatgtgctccagcctgggtgacagagcaagactccatctcaaaacaaacaaacaaacaaacaacaacaacaacaacaacaaaaaacaaaccaaaaaatcagcccagcgtggtggtgcctgtaatcccagcaacttgggaggctgaggcaggagaattgcttgaacccaggaggtggaggttgcagtaagctaagattgcaccattgcactccagcctgggtgacaagagcaaaactccgtctaaaatatatatatatatataattttttagtgacctagatgggagggcgtgaggcagtgtgggaagattgataagatcagtacttactttgttaaagaatatcaagtggctcaacaacttaatttgaggtcctgatgtgtttgtaagctaaacgtttctttccattgcttcctcccattgaggggtacagccaagtgagcaaaaagccactcccacatgctttagggccgcaggactgcctactagattctaagaaaaatggcaagttgtcctcttatcacaagataactggttaatatgttgcttttcaaggttggcaataaaagtttaaaccaaaacaaattaaaaaaaaaagttacgtaggttttcctaccaaaggacttttgcgatccttcaatacgtgaatacataatgtggatttctagggagtgctgtggtgtggactgttacctaaactttgcctgtggaactctttattcccagaatttctcttggggctggcatctgtcctgctgccttcactctgggaagtgttgtgtatgccatgctcttcccctctcacagagtaggggctcggagttgggaaaggtcatcttcaggtggggcagccaactaagctctattaacgccagtggcatttgtgctatgctatgaaggacagggtttaggtattcagcatgcagaggaaaggcatttctggtgggggaaccagcatgcgcaaggcagcaaggctagaacccacaggaatagcaaggagcatggtgtgtgtgaaggggaatggtgagttgtaggtttggaaaggtgggctaggattggattgtgatctagagttaagcatttggtcctttgattcagcaggtgacaagtaatccccaaggagtcagtgactgatcaaaggtgagctatagtcacattaatctggcagtgaggtatggatgaactgattggtaaaccgacgagaggtagaagcatctcagctaggtgagagataactggggcagggaaatggcagagggaatggagaggcaacacactcaatagtcaaggaatgtggctttctgtctgagattgagttcagggaaacccaaaaaactctttttgggttccatttctctgtgctctcagtttccaatcagagattagagtttagggctgctaatattggtggaatttgcagggaaggataccagagaggagggagctgtgcaaaaaaggaactctagaagtctgcaggggtcccttgagtcctttgccaaatagttaaccaatcatgtagtgagtatatttctgtgaggtctagcaggctatagctactgggaggcttgaagtgaacatagcctctaaggtactgggagtactttggaacagcacagtactagaagatttcaaatgctgactgattagagtggagaaaccccactcaacaccagggcattgagttgagacctcagaaaggccacactttaggaataaaatattctagctctggagtaaagctactctagacccactgaatggatcctgaaaacagggcttaacaaaattaaactgttatttcagtaaattaattgtctgctagagcaaagctcaacaccctttaaaggaaggaagataaaaaaatctccaccttcaagaacatggcatccacaatgtccagcatacaatcaagaacctgagaaaaaaagcaaaatatgcaatcaactaaaacagacctatggatgatagagatgttgaaacgtactagatacggactttaaaacaactgttataagcatattaaaggttttaaaggaaaacaaagatgcaacaagagaagttataggaaattccagcaggaaaatgaaaactatttcaaaaattaataaaaattatagaattgaaagaaataatatctgtactgaaaatttcactagataatattagattgggccttgcagaagacaagatcagtgaacttgtagacaaaacaatcaaagctatccaaactgaagaacagaaagaaaagggaaaaaatggatagatagtaatctctaagtcaatataaagtagtctaatatttgtgtcattggagtagcagaaggaaaagagaggtagaagggatagaaaataaaataaatctaaataaataaatatgcaaagattttctaaatttggtgaaaactacaaattcaccgatctaagaagcttaatgaatccaaagcagaagaaacataaagagaaccattattggagttctcaataatgttaatatgtcagttattccaaattaacatttaagtcaatgcaatttcaatagaacatctcaataggtttttttggtagaaatttccagtctgattaaaaaattatggaaatgcaataatctaaaatagccaaaactatcttgaaaaggaacaaaattggaggacttacagtctgattttaaatcttactataaagctatggtaatcagttgaagttctaggcaagatcttatatgaaagaaaggttctcctgataacagtatgtttgaaaattcttgtggtagtgtcatagaatccaggtgaaggaagagtttgaaggaatgtgtgttgagactaatcaaaacataccgcaataaagaggtccttagtgacatttgaggccacaggacaatattggtggggagaaaaaccagattttggggggttaaggagtatatgagtatcaaggaaatgcaggcaactggtatagatcacaagtaggaagggaaaggggagatgcagataaatattgtggttgagtagcaccttcctcatgttcacagctcactatcattagtactagagatcattttcttaagttaaaggtactttgattaaagctgtggtctttaagtgtgttacttgatttgacaagaccaagactccacaggtttctcatctcgtctgtttttctagtgactacaaaatagctctcagacaaccctaatgtttaagtcatcataattttttccaaaatatttatattttaaaattcatttagactcttcaatgcatatctcccttaggaagattctccttttcttaaagttgaagaattttttttctcttgggaaattccatagttcttaattatacttgttttaagaaatttatctcttttacatttaaattacatgtatttatttaaatatttaaactcccaaatagacattacactctctgagagtgagcttcatattggattcctctttgatgaatggatggatgaaggcatatatgtctgtactggattactgtttaaaaggcaaaccacactgcttatttttatccccactttttgtttaaggagattcttctaggaaattcatgcaatccagctatgtgacaaatttaatattttctttataatatacatagctatttagaggctaatttgaaaatactttttattccctaattaattttgtttctcctattacagaaatcaaaaaacaattttgtcccttttgtcttccctccccttccctccttgtcttctccttctctcccttctttctttttttccttttagacccacttagtgtgcatcttcagggttgtgtgcctgcagagagaagtgctgcagaaagcagggttgagctagttattagattagggaaaaggggtatagaaactcaaccattgacccctgacctggctgtcctggaggaaacttactgagtcccttgtgcctgtattttctccctgaaatgaggctccaaatgtatgagaattacctacttcagggggaggagaagctggaaaggcagacagtttcacatctgaaagggctttgccttcttagggtaattagtcagaataggatgcacagtgaacaggactcctggggcctctcttctaattccagcaatgtccctgtctgactacaactgtttaacaactcacttaacctttcaattgattggtactagctgacttccagcttttggagggaggaagacagtacctataaacgtataatagtaggagaaacctaaaagttcaacaatggcattatgatatagtagttgtgagcttggactctaaaataaaactggatttgaggctgatccttctacttacttgttatataactttgggcaaattttcttaacttcactgagtctgttaattcctaccttgtagggttgtaagaattaattaatgcatgtagtgcacttaacgcagtgtctcattcatagacagccctggaaatgtgccagggattatcatttttggttaaatacataatgagactacacaattatgaaagataatcagtctgtgagtactctgtaaattgttatgccaagttaaagtgtcacaatttatataattgtttatggtggtgttgtcataatcagaacttgccgtgtgaaagaggctttgtcaattatttgaacttaagactttgcatacctctgtttcttgctgtttttttctttttttaaaaaagaaggaggctgggcgtggtggctcacacctgtaatcccagcactttgggaggccgacgtgggcagatcacgaggtcaggagatcgagaccatcctggctaacacggtgaaaccccgtctctactaaaaatacaaaaaaaattagccgggtgtggtggtgggcgcctgtagtcccagctacccaggaggctgaggcaggagaatgacgtgaacccgggaggcggagcttgcagtgagctgagattgcaccactgtactccagcctgggtgacaaagtgagactccatctcaaaaaaaaaaaaaaaggaagaaattcttgccttttcccctgtctttctctcaagagtatgatgaaagatttgaaagaaaatctagttcttaggtttgtacaatcttcttgccctaggacattattaccaatgattttaggtaatatgttgttactactattaatgtattgttattattattaatcaatgtaaacattataatgcatttttattttatagaaatggaatggcaggtctgctatatctaataatatgaaataaactgttacctttaactattcagcaatgacacagttatatttcatgccaaaagtatttagaatcatatgaatgggtttctgtattcaatgttaaaataattcaactttgaatttcccattaaatatgatattataaaaatgatttaggtacagtcccctggtgtgtttgaaactgtacactctgcaaacacataaataaaaatatatctaattggaaaaaaagagggaattcaggaaattagcctgaatgcagcttaaactcatctgaacaagttaattgtgcctcttttgtttctcagggactctttgtatcaaatgagtttatgatattagcctgctcctctcatatcaagatatgttatcagtaaataaggctgtggttttgatgagtgtttgtcatattttggctcccaaaagtccttatttttctttacaatgtgtttaaatttattataatatcactgagtaattattacatcaccatataggagtttgcattatctcagctacactactcttaacttttatcttaaaataacagtttctgtgctcagtggaaaaccgcgagctttattagccctgtgaaaatgtccctatgaatgacagacaaaaggtagtcctattggaatgtgacatgattatttatttccttctaaagtacaacttcataaattgaaattatttttttctaaataaatactgtgtgtaattttctcaatgaaaccatatgtcatgggatttttgtttttgactataggagtataatgcttacattttttttctgagcctttccaaatatgaaactttagctatcctgcagagaggcctgcttgctatgaaattgctatagatggtacaatggcctcacatggggattctttggattctacaggggaggtgaggcttggtaattgaagaaccagaagtgttcaaattagtttacttgctgactcattgggtgactggataactcagttttgtaatctcaagttgctatttctcgaccagcgacatggaaagattttatggaagtccttagtaacagaatgtgaaaactgtgatatgtcaatatgttattttatcagtatatttaattcttcatgtgcgagaaaagcttgcttttccacaggtccatttcttgaatgcatagtagtaaactaccatctccctgaagcctgatgaagaattaaaggcacccaactatgagtaggttcctttcccaggtatgaagggtctcagatagtagttgaatgggtttcagtggtatatgtggtgtggtgtgttagtggtggtggttgtggtatgtgttgtgtatttgtgttgagtaaggagtaatatgaatttcatcagtgtttggatatgtggttctatactagacatgttaaacattttttattttgctgaaagctctaatatgttatcagttttgagtctaatatacatagcatttctatttgcaaaaacaaataatcatctcagccttgagatacaaaaggcaattcagtcaatttggagaacttgggttttctcctcagggttgtcctctttttaattcttgttgattcagccataaatcttcccctccaaagaccttgcttttattcccacagcactgaagtctgctcttactttaaagagccacagtaactgctcctaacatgcacatctttattaggaaatgtagggaaccttgaccagatagcgcagagcagctggagcctggaaggtgaagaaatttgggtaaagatgaatgggttattcagatattaaaagtgttatggaaacggacttcatcgaattgaaaatcagctcagaaaaaaaacaaaaacaaaaactcctgtgtctcagggagttagaggagaaaagaaggggaaccagaagggagaggcaggagcattgggaggaatgaagaatattgaactggttttagataaaggctgttacttggagatagaaatgaccttaatggtattactgtatgtatgagtggatgttaacttgcattaactctataaaatggtagtttcaggcataggctttttccactttctgttctttttccactggtgcattccagctttgagctaatctcctcgggcaggtcaaataagggtgtgtaggcacaactcctctaagagcttattttagttactgtcttcttgaattgctttgctggtaggagggttaggcaacacctcttctagtcccctggctgtccttggctggagttagctgatggtagactagtggcagggttgtggatatcccaacaatgccacaaagtccctttctggttgtatctctccatggagccaacataaatgtaaatcagcagaaaagtgtgcagatgagaagatattgtccataaaatacacaccaatggatcatttcagctacaccagaagaaaggaaatgtgttttttctagaggataaaagagaaaagtagccatttaatgagggaataaactaccctgaagggtatatacattaaaaaaagggaaaaaaaccaaacaaaataaacaataaaacaaacaaataaacaacaggaaaggcatgccttgattctataggttttacaaagaaagctctagctcctttctagaatattataattactaaactagtcttctcaggttctccctttgatgggagatgcagaataacttggaatattttgaagagttcccttacttccagttaagtgctagtaacctcctcaaattaatggatacttagttgattttttagactccttttctcctttacctaagagaatttgcagcagctttgcagttattccctctgtgacagtgatctccaatatccagttctttattttgaggtcaaggaagcacttcccttcccagccttttgaagtttgatagggccataggacttgtatagaatgtgggtagaagcactgaatttctggagctcaaatctctagccttttttttttttctgtgttgactaaatagcccagagtgtgggctgaacatacgtcctcaacatatgggggacagttgttctgtccaagagatttgccaacatctgtagtggatgttgtgtgaacaagacataagcttttgttgtattgctccgctgaaaacttgggattatttatcgccacgtgcaatctagccagacttaactgatgacaccatttttaacaagtggctctgcagccttgtggcagacccactctattccacatggtgtctttaattagtttttctgtgagtctacagggaatcagaactggatttacattcttgatggcaagtatgacaagttaagctatgagatggaaccattaggcagaaacgactgatgggacttagtgaggaaaggtggctggacatttgatatcattcagcctcttttcatcctctggactcccactctcctcccatgtcatcggtgatgtgtttccaccctcatctgcagtcctgatgccctgaagatcctctgtgggattttctagtactgagaaattaatcactttctttgtaatgttgttgcaaacagtggaagtttctggggagacatgactattcttggcatttctgcctgtgctaagtctctatttatttccttctaagaaacacactggaatattgtgcatcaagaaactttcctcaaataaagaatatattttacatccatttccatagctctctataatctgtttatagatagcttccaaacttatgctctttcattttttctctttaaattttacttaaaaaaatttgttatgaagacttaaatcacaagggaaaaatgactcaaatcatttgataaagagactatattggctcacagaaccgatgataaagatgttatactggctcacagcacaggaaaactaaggagtcataggaatggcttgatccagcagctcagggctcactaatgagatggctctttccatgtctcttccctgccttgcagagtgtcagattcaacctaaggttgctttctctgtggccacaatgtggttgtcagtagcttctaggcctacttgctttcctattcgtatcacatgggaatgaaagggtctttcatgagcacagttcagaagaaggaaatttcttccccagaaccccccaacaaatatgtcttcatgactcattgatccaacttgagttaattgggcaaaattccctctgctcagggtaatgggctttgttgattggttttggccaatgagtgatcactgtgcacttatagaatagagctaatcccatcccaaatacctgggtaaaaatatggtagcagtgatgcctggaaggtaagtcttgaagctgttgataagtggaaagctggagaatggacattgccgtcagcaaacacttgacctcaatgaccttgcttttctctttatagctacactaaggccacttcctctgatgctcctcacttctccttttgctaacttaaggccttgctgttgcatgagattttgagggggtgaaaacaagtcaccttttctgtataagtcaggtaaatgaaaaggaaacagtttggtaagtctcccttagaattcagtaggaatgtctgcttttaacaaacaaacaaccaaatgagaaagcataatgactacataaaacacacatatcttcagtggcccgcaggactttaaagtcagttaggtgtttcttttgtgatgtgcgtcttcctgtttcaaaatgacagcagctatttttatgatgtaccagctcccaacggggatggctgatcactcagttctatgcaagagaaccttcctctaataataaagaaaagagcaatctagggaaagaaatagtctgttacagtgtcggtttctcataattcatctccccaaatactatacaaacattaattaaacttcccaactgggagcggtggctcatgcctgtaatcccagcactttgggaggctgaggcgggaggatcatgaggtcaggagatcgagactatcctggccaatgcagtgaaaccccatctctactgaaaaaaaaaaaaaaaaaaaagccaggcgtcgtggcaggcgcctgtagtcccagctacttgggaggctgaggcaggagaatggtgtgaacccaggaggtggagcttgcagtgagccaggattgcaccactgcactccagtctgggcgacggagcgagactccatttcaaaaaaaaaaaaaaattgccgttctttaatccttctgaaacatgatttacagatcactcagagggtcccaggcattgtctgagtccctcccagggattttcagatgattgttttgagagacaaccaaaaactatgaagttatgaagggcctagataaaattatgcattcaatatctagaatgttagaactagtccatccctttggactttgggaggttgctttaagtctacagagaaataaaatacaactcctacctcgtagaatgtactatttaataggggagatataaaaactcactaactgtgctataagcaaaatataatcatgtgataataaagatatgtgtattttgttatggaaaatcagtgaaggcaaagaaatcttctgggtggaaaaattacctggaaactccctagagagtgtggcattttattagggcctaaaaggattaccaggatgtggataagggaagataaggaacaaaggtctactagctaagagactagtcttacagagtcccagagatgggaaaacatggtttacgtttaagtgattttatttggctggagtgtaaagtttgaaagaaagtaaccaggaaggcagttactagaaacaaaggttggaaaacatcatgtacaatcttgagtgccaaactaaggagtgtagatttaattcaggaggaaaataaagctgttagaggctttataaattttgttgccaccactgtgtctcataaaatgctccttagatcccatatcagagtcagaactctagtcttgctgagctgtggcctgatggcaggtaaggtgagttctaaaacatgtagctgctgttctcttggagctcagatgccattacatgacaggcagtgcttccacgaggggtgagaacataaggaaatgaggtgtcttaagactgcaggtgaaaaaggatgaaggatgagtattctgaaagtaatacaaagaaacgcagggtgaccagagagcatacctgattcttgtagggtgttttagattcctggtaagttacagagggaggtggtatgatatagtggtctgagattggctgatctaagtcctaattcaaggcttgggtgttacctacctgtgtgcttggaggcacgtctggggaaaacctcatggctgggcgagatggctcactcctgtaattccagtactttgggaggctgaggcagttggatcacttgtgcccaggagtctgagaccagcctgggcaacatagggagacctcatctctacaaataatgcaaaaaagtagctgggcatagtggcgtgtgcctgtggtcctagctactcgggagtctgaggtgggaggatcgcctcagcctaggagatggagactgcagtgagtcatgattatgccactgcactgcattccagcctgggcagcagagtaatactctgtctcaaggaaaaaaacaaacaacaacaacaacaaacccaaaaaaacaaaaccaaagaacctcttagtttccccatctgtaactggacaaaatcaacatgttccaatgtgaattctgtaagcaattagtaaagaaacatgtctcattagaaaaaaaagtgttctgggctgggcgtggtggctcacgcctgtaaccccaggactctgggaggccgaggtgggcggatcatgaggtcaggagatcgagaccatcctggctaacacggtgaaaccccgtctctattaaaaatacaaaaaaattagctgggcgcggtggcaggcgcctgtagtcccagctacccgggaggctgaggcaggagaatggcgtgaacccgggaggcggagcttgcagtgagccgagatagtgccactgcactccggcctgggcgaaagagcgagactgtgtctcaaaaaaaaaaaaaagaaagaaaaaaagtgttctgtagtgaagtaagtttggtgaatgctgcagactcgattctatcgatgtccagtcagacattaaaagcttggagagtcctgcaggaaggaaggcagttttactctgttgaaaccagtctttcctaagcttatttggtcataaaaatcttatttttttttcttccatacaacacctattggctctctgtggaacactttgggaaattttgggctaggtcatttttagctccctttccactttgacactgtctgattctgtcttacctctgaaggtttcttttcagtctaacatcttatacatccaaggaagttttcttctccagtctggctgagtacaatttcctccctaaactatcgaattgactatcatcccccaattaactttgtcagagttgaggcaggaagttctttaaaagtgtttgtaaaagtgctttgagatcctttaaggaaggagatccctggtggatttgtcatatgacttcattagacacctcgtatgctaaggagctatcaacttcagcttccagtttggcatcatcatatttctaacttactctattaactaggaaacagctgagggattattttttctcctcttttttgcatctgtgtataatgtaatttaacttagcaaaaaagacactgattgcctgtcccacgggacttaattaactcccagcttcatggtgctccatggaaataataagaaaagtaaaagttcaagtgttcggtacctgtccacttccacctctggtgcataatgagacgtcaggaacagtgacactgatgagatgtgtaaaagatgctgattatagaaggcagcaagctgcctgctcggctcctgggagctctggccaggctggaagaatcaccaacccagcaggcagcctttgccttcagattacaatttccaacattctccccactcacctccctgccacctgagcagtggttttgttaacctttagctctgccttctgcaccctggtcagatgttatgacaattgtcacggggaagataccatgtttattaagctgcctgtagcaaatccggactggtagtgcaggattctaccagccagccctcaggggagcccattaagaaattgcaaggctaataaaaatcatgctggatgaaattgcaatcctctggtgccactccgtgatggttgaatctagttttacattttaatgggggcagggactgaaggtttgaaccaggacccttgtaccagcaatactgaaggtagtaccttcttaacccagagctggaatggagcagaaagaagacaagcttgcttctctttttgtgtgagttttctgcacatttgagataggaatttattaatgtgtctgataagttaacaatgcactgctcctggaaaaaagccttgctctgccatgtggcatgaaatttgggccacagttagagtcttccagcctctcattgaagccttcagtgcccacgcctgaggggagactaagaaagcaggggtctgggttcttttctcttggtaaaattgttctaaaatttccctgtactggtggcttctccacaaggaaattgtgtggaaattgggagagccatgccagcgtttaaactcatcttcatactgcaccctttcaaatccaggcaccactgaatcagggagtgattcttgatttctttgcctcatctcttctgctcacagaattcataacttcacttggataaattgatacttttcaaacattaaaatgaaacaaccaagtatgtaatcgctgttttgggaagattgagaaaaatggaaagaaaaacatattagggtattcaatacttgctatgatgccacctagagaagcatatttctgtattttattgtaaagaactactactactactaataataatgggaaggggtaacattaattgaatgcttgcttcttgtcaggaactgtgtgaaaccctttacttgaactgcccatttaatcctcagaatgaaactttaaagtgatgactattatcatctcaattttacaggttgataaccattcagaaatgcttagaagcttgtctcaggacccacagctggaaagtggcagagcagggactcaaattgagacataatgattccagagcctgtgctctttggcactcttgccccataatcttcaagctggagagtttagagatagtaactcctaatttcagtatctacaggcattgggtgtagaagtataggaatatgatgaaataatttaaaaatgctatctgtatgttgagtgaataaatctggaatggtcataagattaacattggcaatgcttggagtgatatatttatttctatgactatatatttatccataaagtccatcattaaagtacaatttaagatttctctgtgaagtcttaagaaacaatccctttcagcatcaggggatattgaccctattctttactgggctttggcacaactggaaatacatcacaattagcctatttaaggcaatgtatttattggggcctattttatttaacttttaaaataatcaattttaaatatgtgacaatagagagaatagcataatgagccctgtgtacccattgtctaccttcaacagctatcagcttatttacttttatttttttaagtgaggactatgttatgtaggttatcctttgaaaagaagaatctgctaatgggaattttaagggtgaaggtgagttttaacttgggtatctctcatagtggctatattttacatttatttgaatttctagaaggcgtgaggcatctagggtttgtattaaaaattagagcacaatacacataaaccaagttttcctttgagtctcttttattttctctttcttttgtttctatcttccattccagtcttatttaaagtttatgtttataaggtctaaaacttcccaagtgtatttccatttttaaacagatttcttggagacccaaataagtgaagttacagtggtagaaaaagtggcagtaaagatgagttttgtatatagggttgtccatgatgcttggcaccagattccattgtctgagcaactaactcttcattaactttaagacagtaagtggcaactcaaatacattgaacatttatatgtgacagacacatggcatttaagtattttttctacttattttcatagcactctgagtagatagtattagctccattttgcagataaggaaacggatgcttcaaaatgttaggagacttgccctaggccctgtggctaataatgttggagctatgagtttgaaatgtagtctgcctaactttcaactttctcttaatcatgatgctgcctgctgaataagttacaaaaaaaaaagctagtgaatggtattttgggggtagagagagagagagagatgggaaaagagtgggatagaatggaaaataaatgagttcataaaaaacttttgataaaatctcatatccagtgaaataagagcaatgctacatgaattcactttaacttcaaggatatgactatttactaaggaacaaaagtgttttgattttagtttgaaaatattggtacaaagagcaagattctttgtatagcccataattatctcccttgccctgaaatatggaagggctctgaaacacgggaggggcttcacttattcttgccctgatttattatgaaaagatgtccaccagaataaaacaaagaaatatgccaaacaaggaaagcaaaaggactgggggagcagatattatcagtgttgggagaggcaacatctgcacaaggttgttaagatgtagcaagtcaagatggccactgcagtaaccacaggctatgtaaagagataaatggttgaccccagctcgtgtcaggctacgattgatgccactatcagccctagtgccttcccaatgattttttaaaaaaatctttgatagagtgtgttatctagttactggcatgagggcaatagcctggaggggtgaaggaaaagggaagaataaaaggtcacaccaggaggacaatctctgttggactaaatgagaaaaaaaggatctagctcaaaagggaggaaataaataaataacaataaacgcagctgctaggtgcatgggtggaatagtgaaattgctgtatctctcccttccttccttccttccttccttctttccttcctttcttccttccttctttccttccttccttccttccttccttccttcctccctccttccttccttccttttctcccttgtttcctccctccccctatcccttcatttcctctggtttaaaaaaaattaagacagaccttgagttattactgggagttcagcagatatagctgtatattctttgtttttctcttgaggtattttaatggtctaattgggattgttaagtcttttgtttaaatctctagaagtggtgaaatcaaaggcctttgttagccttcctctctgtaggataatgatgactcgagtgaaaaataataacaaaaacaggcaaaacaaagttcctctagataatgggaaaatatatcttcataatatgccattattaatttatttgtggtgaattgtgcaggttcaattctgtgataactctctggtcttcctttctacacacatacacgtgcacatagagacacccctgcaggtgtgcctgcatgcatagttgttttcacatgtacctatacgtatttttggaaaggcaggaataaaattgcttttgctcagtatcactgcaccaacagaattgtatttcatgataatagaaactttaattggctcctttttagccttgaaacatgttttgcagcagaaaaagcaaagaagggagaactgaaatagtgtttttgtctaaaagagtatggctttaattagtataagttttttctttttatttgacctggaaaaatctagtttttgttttttttcctttctctcatgaagtttttgtagaaggtaaaatgtcagtaccagggcaaaggccctggagactggagtggattcgcagcatgaatactcacctttgagaaggatcgtattggatataaagatatcgcttccaaaagcaactctgggaagagtagagaaatattttttaggcagatttcatccttttctaaagccacagactttaacaatgtgagcccctggccttatgttgttgattttctatagctagtgctgtgcaggctcatcgttagttggcacaagttggaggacttgtcttgtcatctcttcctctgtcaaaggtataagagtaatggaaaagctgtgagtcttgatgctggaagacttgggtcctagtccctaacaacgccaaggtcctgggtccttgacttaatttctcagagccatcatttcccctcaatgatggtgatagtgcttaaccatatcttcctgcaaggtttttgagttttaaatggatctacaggtgtaaagccctctctaagtatgaaagtgccattcaactcttagatcttttatcaatgtggactccagtggcatatggtggtggtagttggctgtaatgtggccaaaaggctcgcatagaaaactggaacgtgctacttgcagagtacagaaataaaacagtggctgttggaaatttccttaggattgtttaaagtgggagcaaggtgggggaatgaaatattagggctagatgaaaaatatgtagtatgtgttttttgtacttttaagtttctaattggcgacataaaatatatgctggataatttggtttgccaatagaattaattattatgtttgagatattatatttaaaataaaaatttattttgtcaagaatttgtcttatatattgaggcataaattacctataatgaaatgtacagatcttaagtgtatagcttattaatatatgtatatactgtgaagcccagaatcaaattgaagacatagggcgttttcatcaccaaggaaagttgattttgttttcatttctctttgtttttccataaatggtgatgcaacaactaaatcttaagaaatctatcttttccttgttttagtttaaggaaaagttgagaaaggcaagaagtgaacaatgatacttaccaaacacctgttatatgtcaggcactgagttagcctttatgtatactaattaactcattaagagccctcaaaaaatctccattttaagataagagattgagcttcagggaaattaggtgactaccaaaggtcacagagtgactatgtggtagagttaggatttgaatttgtgttactgcctccagagcccattttattcaactagtaaaataaaacaattgctagggcttagggacttgagggtcttctggagaatcagagaataccaaaagttcacagtttcagtttcagaaaaaaaaaaaaaaggtcttagaaaaagaacttctttcctgtgagaggacaaaactgattgggctcaccttttgactggagattcagtctgatttaacctttctgtttctgaggctatattttcctcatcatttcagatttatgaaacttttattatttttgagacaagtttttaatattgcttaagggcatgggctgctaaagtctgaaaacagattctcaaagccttggttccaccactttccagcgttttgtttttggtcatgttactttccctctgcatttctcagttttctcatcataaatagggctaataaggtagactcttggaaggtcattgtgaagttcaaacagggtatagaagtgaaggtttttatgcagtgtcctacatctaataaatgctcattcagtgtttatcattattattcttgttattattatcatttctcccagcctcataccttcagctttgaatattttaattgttgttctggttttcagtttgctattttccaaatccagatcaatttatttaatgtgctaccaaaatgggggtattgaagtgagtgagaaaacaactggactctgagattctgctgtgccctcaaccctggagggctctctcagccttgctggttggtgttctatcttgatgtcctcatatcctgtgtacctaatagtagtcacaatcggcattaatcaaccacacctagcatttctacacgtctgtacccacgctttctttaaagccatgctatttatgtgctctacctagtatcggctattatacttgtttcctgctagattatgtgtgtgccagaggtagtctgagcacctactgctgtgcctggggtttagcaaatgctgccacgctatttgttggataaaggccatttccaaatttcatttctggacaaaactcctggcggtgtcatatatttttccagttttaaagtttcctaatatctcacttttctattttgcttggggaatgagaaataccacaggagttaatttgctaggcaactgaaacatttccgtcaaaataccaagccatgtttatttttgatattaacttctaaaacattgcgaaggcttttctgtccttttacttgaacataggtggtagtatcaaatattttgttgatacctctggatcatcagcacaaacttcagttgtttcactttttaaaaaaataataactctatcccaggtggtgctattgaaattgctaaatggcccatgactgtattgatgtatttcgtcccttcctttgctgtcagactgcaagtctcacatctggatgctgtcagtagcccctacttccttctaattgatccttttgttttcttcagcaactgacaagataacaaaattttaatagatatatacgattctgagtgcagtcttgaaagacacatcttgaagaagtacatgaggtttggtgtgtggatattgtgataaattccccacctctccccttcatttctcattagtcatattcatgactgagattgtgaagagaacagctatgtccctctccacgacaggtctgaatatggcatttctataatattagagacaaatgctatatattacttacatttctgtttttttaacttgaaatcattataactacacagatccccatagcaaaattattcctattaatcccattacgtttttaccttacattctcactttgctaactggaaatatgctgattataaataagttgttaatatgaccggtaccatttgtgaattaataactatcacaaatatattcttattcacaaatggttacataaattattttaaaaattactttccattgtataacttctagaaataaataactcatatagcatgtgagaatgtagtatcaaaatatcacatgtatcccttaaatatgtataattattatgtatcagtaaaaaagaaacctttctattttaaaagatatccctgtgtcttatcatttagggtagcatatgctttattattattatttttttgagatggattctcactctgttgcccaggctggagtgcagtgccacgatctcggctcactgcaacctccacctcctgggttcaagcgattctcctgcctcagcctcccgagtagctgggattacaggcatctgccaccatgcctggctaatttttgcatttttagtacagacagggttttgccacgttggccaggtgggtctcgaactcctggcctcaagtgatccgcccgcctcagccttctaaagtgctgggattacaggcatgagccaccgcgctcggcctgctttcttttttataacattcattcctcttaaatttttcgttgttgtatatttcttaaacaatgttccataaacccagaaactattgtttattcactattggatttttcttacaaagtaggccaaaataaagaatcaataaacatgtgttaattgttttgcaataaatatttcaagaagttgatttctacaaacaatactgcaacagacatcttccacatttatctttccacatattttgagaaagtatatgaaactcagagatagccttcaattgtatgtagtttttttctaatttttttcacagatcatgcatattgcaaaataatatagttgtaccagtttacacatttccattaaaaaaggaacatatgaagatttcattttaattttaaaataattgatgatctagtaattgttttttttttctatggaaaaatatctagtaatgacaaaaatatctttggacaaagaatccaactttcttgctttctccttattttttctctagttgtaatgtctgaattgtcttcattgatttagcaccatccttggacgttttctccttggtattgtaggggtaacccaacgttaatttggtgaataaaaaccttgaaattatgttatttctagttcgcagattctgaacttccttttctttgtaactgagatttcctctccattccttagaggcattccagattaggttataatttctgcttttacttttacttggtccaggaatgcctcaggcaaaggatactcctacattctccagtgtaacactggcttcagggaaaggggagcagttctgaatttcatactgatattggcatccaggtgtgttcaaggtcaagaatctgtacaggatcactgaacacagaccattgttcttaggactgtggcatgagattcaaaataatgctccctctttgttttaataaattttagaggtagaaactgacaacatgtaaattttgtgcaagagcagggtatgtgtgagtatgcttttctttcagactcaatccctctttttcattttacttcttaaacaagtcagaatgcctaaagccttctttgttgaggagtaaagtgaatagcttccttccatgcctttctcttggggaaactacttggttaataatgaattcactttcattcaatgaaccaggattttagctaagaagaatccatgcaatctttcaggtttattgatctagtcactgtgttctcttttgggaaaggataattttaatggcattacccataaagaatacgtgtttttatcttgtctttctaatgagcgaatgctagagctgaagcctctctatgggcttttttctttttgccttgtggcctgcccctttgtcataactcagagttttcaaatctgtccttataatccaggttgctgtagagcaaagaacttcattaacattctcctgctagacttgaaaacaattagaacagtgtgactagaaagagttaaagaggaccccccaaaccctaaaaccaaacagacatcacagagcagggatagcaggtaaagtggttgctataaacactttctcttgaaagctgtgccttttcaataaacacaccgttaggccctagcaaaatatttccagttgacttcatgggtggtgcagtgctggaagctgttagcttgtgctcagttaaatttcaaacgtcaaagctcattaatagtgattttagccaaagacagcttgtaaggagctgtgcaaacttaacttcctcaaataaaatgagaagaaagatgaccatttaacattgcttttcctccccctgctttcttcacctccgcttcgagtttgttttgggttttattgacagtaggtttcaagtttatattccgcatttcccttaatttgctttgtccttttatctgccccctcttgggaaataggcctattacaaaggtgttgcgatgtttctttgagttttaggaggagtgttttgtctgtttgaagcaggcctggaggagtctgtgaaagtgttaaggcagaaggttcggcttttgagagagaaacacactgtgatatgattatgtgctcatatgctgtttccagtcttgtctctgaaaactaatgtaaaaggagattccgtttacacaataatgatgtttcagattaaaatatcaatacaagcaagcccccttattttttgtagtctaggcagttctcacctctgtaggtacgtagaaaattaaatttaaaaaaattttgtttaacctagtctcaatttacttgtgcagttatgactgtggatagtcctgctgtgttaaattctctgacaaattaattaataatggagctaccaattacaaatttgacaacgacttggacttccttttgattttgggttttgttaacggtacacttcactgtgtttccttcctttgtcttgcaaaggcttcctgggccctgcttaagcaatgtctgagatttcagaatgtgttgtgggagcctcagggaggctgggcaaaggcgtccgatgtggttaagatgtggatactttggagcctctcttttttttattttattttattttattttattttattttatttttatttttttatttttttattttttatttattattattatttttttttttattgatcattcttgggtgtttctcgcagagggggatttggcagggtcataggacaatagtggagggaaggtcagcagataaacaagtgaacaaaggtctctggttttcctaggcagaggaccctgcggccttccgcagtgtttgtgtccctgggtacttaagattagggagtggtgatgactcttgacgagcatgctgccttcaagcatctgtttaacaaagcacatcttgcaccgcccttaatccatttaaccctgagtggacacagcacatgtttcagagagcacagggttggggataaggtcacagatcaacaggatcccaaggcagaagaatttttcttagtacagaacaaaatgaaaagtctcccatgtctacttctatccacacaaacccggcaaccatctgatttctcaattttttccccacccttcccgcctttctattccacaaaaccgccattgtcatcatggcccatccccagtgagccgctgggcacacctcccagacggggtcgtggccgggcagaggggctcctcacttcccagtaggggcggctgggcagaagcgcccctcacctcccggatggggcggctggccgggcggggggctgacccccccacctccctcccggacggggtggctgccgggcggagacgctcctcacttcccagacggggtggctgccggacggaggggctcctcacttctcagacggggcggttgccaggcagagggtttcctcacttctcagacggggcggccgggcagagacgctcctcacctcccagacggggttgcggccagcagaggcgctcctcacatcccagacagggcggcggggcagaggtgctccccacatctcagacgatgggcggccgggcagagacgctcctcacttcctagatgggaaggcagcggggaagaggcgctcctcgcttcctagatgggatggcagccgggcagagacgctcctcactttccagactgggcagccaggcagagaggctcctcatatcccagacgatgggtggccaagcagagacgctcctcacttcccagacggggtggcggctgggcagaggctgcaatctcggcactttggggggccaaggcaggcggctgggaggtggaggctgtagcgagccgagatcacgccactgcactccagcctgggcacccactgagcactgagtgaacgagactccgtccgcaatcccggcaccccgggaggccgaggctggcggatcactcgcggctaggagctggagaccagcccggccaacacagcaaaaccccgtctccaccaaaaaaaaaacgaaaaccagtgaggcgtagcaggctgaggcaggagaatcaggcagggaggctgcagtgagccgagatggcagcagcaccgtccagccttggctcggcatcagagggagaccgtggagggagagggagagggagagggagagggagagggagagggagagggagagggagagggagagcttgagctttggagcctctctaaaagggctctgtaccgcagtgcctttgaagaatttgagcttgggttgcacagaggtttttgcaagactctgtgcaatcggagtagaggtagagtgtagtgggaagagcatgcaggttgagtgtttatcaggggatcttgtgtcagaggtttcttgtgagggtttatagtgattcctttttagaggcaggcatgtgttccaaataggttataaacgctgtagctttttcccatttttgaccaaaatataggaacttaactttttattttttcctccaacagtttatttagacattttaaaaagctgactgatttggacaaatattgctatgctactaaaggctgttaattgtaaacattctaccatcttgatatttaaaggaatctagttactttcttcaagtggactgtattgttattgttcatagatttcaatgatatttggctcacagataaagggttataatagggatcatgttgagtagtctgtactgttcagagtatcaaaagtttgcatgattgcttttaaaagccaagtaatgagatatttctgcaagtaagatcatagtctgataagtattcctacaactgctaccttttagctttcattttctctaccttctcttgtaaacgtccacattttgcccttgtaagaaaagaaacaagcctgtctcattgtaatgcttggcttgtgtgttggtttttttcaacagtgagcttcttgagagcagggaattatgttatttgtcattttatcctaagggtctagcacagtacctggctcaataaatgtttatgggttgaatatagtaaaacttcattaattgatacatgaacaacattgtaggtagaatatttaacttaagagaaaaatcaactttatgaactgtagcacattatttgcatgcaaatgggggctgcaaattataaataagtgctatcaatttattgaagcaggtctactgacattctgctggcagacatggtggcaggagtttgagttataccttgatgaatattttctataatatttgaaaaaaaccacgaaatagttttaacagagtgcaaagaaattataaactttcaggcaagagaaagcattttggtgtcactgacatcccccatttgtttgttgcttgttacatacgggtaataaatgggtctaattcatgaatttggtctaattaatttggcaagtgctcattatgtaccaggagaggtgctagtgacttgtaatatacatgtgactaccatatagtccttgtccttaaaactcacactctagcaaggtgaaacattgatgtaaatatggagcacaaaagcagtgggcactgagcgcagggcagcactgagagaagatagcttctccagggtccaagaagatcattctggagagattttaaatggagacagtccttggaaaacaactggactgctcaggagagaaaaaacacgtgcatacaagtcagggtatgttaggggacactgtggcttttggtatagcttgaggatggcacatgatccagcagaattatggggagaagcgagggatgaggctgggagaccacttgtagggtagaggattagatacttatttgaatttggactttgttctctaggcactggagtcagctcttttctaagctctacactctgtgtattctaagtgtgtgtgggaggcaggtcaggtgggtgactgtatgtgtgggtgactatgtgttggggggagaggaggaggagagagagagggagaaagacagagagagaatgaatgagtgaggttaattttcctaggaagagaatattagcaatgcagaggagaatgaaaggatgtggggggattggaagcagagagatcagaatggctgttgcaatcaatggtcgtccatttaacatttattcattcatttaataaatatttattaaaaacctaccatgtaccaagtgctgcaataaaccctagatgcataaacagacatgctgtctgttctcatggagcctacagtcaagaagatcctggtgagagatgagcagctcttaaactaaggcctacatgaggatgtacagaaatcacctgtagtcttcagacacactctgtatgttctgtatggtcttttcttctctatgtaactgcatacatagagaagaaaagaatgaatgaagaggcatttatgaggtcatggacacaacttggttacctattggacgctggggattaaggacgggacaagtcaggtgattctatttttggtgtttggtaactctgtaaacttgatattaatggctaagtaaataagtttgtagaaaggggaaaataatgaatgtcattatacacatgttatggctgagtgctccagttaacatacaaatggagatatccatccatttagagtttaggagagagttgagacactttctccttcagttcaaacctttcggttcagagtttgagatacagatttgaaaattgttatgaggtaggtgataatagaagccacaggaggtgacaggatccaggaagaatgtgcagatgaggaagaagaggacgtatgcctgggacttacagtgtttgtgagatgagcagagaagggggctgatccctacttgtattctagattacctcctctcctgcttggtagcacctgatgtcaaaacggcctcatctcttttctgcatttctctcagttcataaactgtttaatcttaaataaagaaccccaaacttcccctaatcctctgttgactttatggccccttttagcatgtaactgagtttcttcttccctcacagcccatgtttgttgaaagcctagtgacattgggtgtttcctgttcctcacctctagtccatcccctgcaagttccttggctttgacagcccttgaacactgaaatgcccctggctgaggtagtcttcaaagactactttgaagtccttatcttatgatgtgttttgaacacattaatcttgatgggctctaataatctcttaactccaattcagtccaatataattttgaaacccccaaatttatctaattttaaaaggctccttcacccctagatggcttggaaaccttggtgtggggtggggtggggaatggctgtttctctcttctctccatctccttccttccttcctctaggagttggcctgagaggagagatgagtagggccaaaggagacatcatgtgtggcaggtgcagctctctcttatgggattttctgtggcttcattatagatcctcctgctgggatcttaggtctgcaactctctctgaatggctggcccatttttttgcggggaggatggtggtgaggagctttgcttctccctcaccaatccagtctgcctcttgggaaagatctctttaagtcatatcagcttgttccctttggtgggatctacatttgcctgtctctccagaggtgacatgtagcttgcccccaaaccagtgccccctcttccctctgccactgggcaagggcagctccagccagtctcttgtctttagactttccaggtgggaatcaaatactagtgccttttccattaagctctcccataggttctcttgcagctccactcatctggcttaggtagtggagctggcttagagagtggaaatagaaaatactacaatatactaaacttcgtaaggcagtgtggggtaaggactacagcagtatgtgcaaagcctggtggaagcagtaagaagggtgagggtagctctgctttggggtgaggggacaatatcaaaagcttctggaagaaagaggaatgacctggctttgaaagaatgagtttgtctggtagaacaggggtgaaaggctgttctcgatgaagctaatggaggcaagctctgtaaatgaaggcatgggacatgaaatagcagagtgtatctgaagactacaggtgatttctgtaagttttcaggttgggagtaggggagtagcgtggacaggtaaacagggcttgtgaatacacacatgcacacacacagaaacaaggtgtgcaaacccacccttcacagagcaatgagggaagcatatatactgagggttgccttcttttctgttttctcattctttcacctgggtttaggaccttgagaaagacactttacctctctgggcttcagtgttctcatctgaaaaatgaggatgttagatgttctaaaattccccaattccaaataggctttacagagaagcactgaacaaactaagtaagtttaattttttaatctgagggtttgatctatagaattacagaacccaagaatattgattttatcaaatatggagaaacatcttttttcaggttttttttttttttttttttatggagtctcactctatcacccaggctggagtgcagtggtgcaatctcggctcactgcaacctccgcctcccgggttcaagtgattcccctgcctcagtctcccgagtagctgggactacaggcatgtgccaccacactcagctaatttttgtatttttagtagaaacggggtttcaccatgttgtccaggatggtctcgatcccttggccttgtgatccacccaccttggcttcccaaagtactaggattacaggcgtgagccaccgtgcctggcctttcagttttcaaaattgtggtaaaatatgcgcaacataaaatttaccattttaactaattttaagtgtacatttagtacatctagattgttgcgtaaccgtcacgagcatccgtctcaaggatgttttcgtcttcccaaactggaatctgttaaacaatgactccctagtcctccttcccccagcacctggcaactaccactctaatttctgttcctgtgtatttgactaataggcactttatacaagtggaattatacaatatctgttcttttgtgtttggtttatttcttttagcataatattgtccttaagatttatccatgctgtgtcatttgtcagaatttcctttctttttaaggctgaataaaatttcattgaatgtatatatcacattttgtgtgtccactcctctgtcaatgcacatgagttgcttccaccttttggctattgtaaataatgctgctacgaacatagctgtgcacatgtctctttgagaccctgctttcaattcttttgagcatatactcagaattgctgaattataatctatgtaattttttgaggaattgtcctactgttttcccctgtgattgcaccattttacatttctaccagcaatacacaagagttctaatttctaatttctcaacagtcttggcaacagttgttttctgtttttttttttttttttttttttttttaattagagaaagggtctcgctatgttatcccggctggagtgctgtggctattcatgggcaggctccagctactctcgtaatcagcacaggagttgtgacctgctctttttccaacctgggtcgattcatccctcctttggcaatggagtggtctcctgctctggagaggtcccatatagatgctgaacttagtgcagacatgcttagtgcatagtgcagtactacagctcagaactcctagattcaagcaatcctcctgccccagcctcctgagtagctgggactataggcaacactgcacttcactttctttttctttttgtttttttttttttttatggctgatagctgtcctaatggatgtaaagtattatcttgtggttttgaggtacatttcctcataattagtgatgttgaacatcttcatgtgcttattggccatccgtatatcttctttggaaaaatgtccattcaagtcctttgcccactttaaaaatcaggttttgttgttatggttgttgttgagctatggaagttctttgtatattctggatattaatctcttatcagttgtataatttgcaaatattttctccaattccctgggttgctttttccctctattgatgatttcctttgatacacaaaagagtttaattttgatgaagtccaatttatttatttattttttgtactgcttttggtgtcatatccaagaaatcattgtcaaatacaatatcattaatatttctcctaagtaaaaacaaagaaacgtcttttatgtgaattataaattagcctaagttctatctttaaaattcaattttcttgcttaatatgcaaaatgtaatgaagcttcattaattttattttttatgttttatttttaaattttatttatttagttttctgttgtttaaataatagaaatttattttctcactattctggaggctagaaatctaacatcaaggtgttagtaaggttgatttcttctgaacctctctccttggcttgctgatgactgcctctctttgtgtcttcacatggtctttcttctgtatctgtgtcctaatctccttttctttctattatttttattttttatttcaatagatttttgggaaacaggtggtgtttggttacatgaataaattatttagtggtgatttctgagattttggtgcacccatcactcaaacagtgtgcactgtacccaatgtgtatagtcttttatccctcactccctcccacccttttccccaagtcctcaaagtccattgtgtcgttcttatgcctttgagtcctcacagcttagctcctacatatgagtgagaacatacaatgtttggtttttcattcctgagttacttcacttagaataatggtctccaactccatccaggttaagcttcatttattttctacattgacctcctatcctctaaacatactttgggtgtcttcttatcatcctggttgcttagggaacaggacaagctttcaacagtctatgcctattacattgtcattaaatattctcaaactgttcaaaaggtttaaaataattatttaaactaagcatggtttaagtttgctttggtttgcccagatgagaagcttaaagacttgagagaggctgagtataagaagggagtaagaaggtaagttaattctttctggttcatggtgattgattaaaaaatgtttttttttctttctttctcaattttctaaaacaagcaaacaaacaaacaaacactactttaggtacatcccaggtaagggaaacttcttctggagagggggctatcagaaggtcatcaatgagtgggaaatggtagaataatagaaaactgtgcttcttgcttgccccctttttcatggggtctgtgatgtgattcacccgtactgggatgaatagtgattgctctatcaagaaaattttaaaagaccaaaaatcactttgatttggtgtttgtcctgacctacccctattcaattcattgggtaatcttgtatcagtcactgagtttcacatttataaaatgagatattggaaccaatagctaagctttcattatccctgaactataacacagaggcttcttgggagctatatttcttctagttgggaaaacggggaaaaaagaaatctctattttcttaaagcaaaacagagccacataaataattaatcctcagcaagttgaacaattcatttttggcaagggtgtaattccccaaagttgggagaattctggaaaatgtattttgcacatgtttctgagaggtgttgtggtctttgataaacctttagtatggtttattgagtaaattcagccttgaatcccaaggtagttaactattgcacttgaagtcttgtttcatgagggtctttggggattttggatttccaaactatgagggacttcctgggaaaaaactgtgcctgtggattgcttagtattcaccaaagattctgagttttctgcctttgaggacacgtaaaaaggaaatttggtataaacgtatgtgtatatgttatatgcccaagtttagacattatgtgaattgcatacaatgaattccaggtgactgtaaagtaaatgattaaagtgcattttgctatatggaagttatattgagctttatgattttttggaagggctttggacaatgtttgctttctggagttttctccagagaaaagtgtactgcaaaagaaatgcatatattttattaatcttcttcatcaacagtgaaagcaataaatcagacacatatattttttaaaaaacccagctttacaccactgttttggtatactaaatacatgatagttgatttttggatggtttatttttaatcactggggtatttaagttatgttaccacctgcttgctttctgcttcttcccatattaataactggcacatacaattttgaaaaaaataaaatgcagatgttttttctgtcatgtcaaagtggcatgcggttttgatcctgacatggagggttcctatcagattgccctttctgaaatctctggatctatttcctcttttgcctggactgctgttactggtagttggtgtgttattcaattatctctacgttttaaccttggtgtttacctctaatgttgctcaagtcagtaaatgattcattgcatttggaaccaataaacagggtttggcagaaaagggacaatgtgtggcggatgtgtttgggctaaagggaacaatgcatttgaaactgggctctaagagcttagaaattcaattatgccttcatgcagacaaggctaggtcccacagttcctggctcagagtgagcacccagtaaatgttcacaaagatgagggtgatggttttattctacaaaatctgcacgtacaaggaaagcatctgcatcagattgcataggcaagtttctcaaattctaggttattgagatttcatccccacctctgaaacatcttcctgggtttcctcattcttcaggtacaattgataattttgtggtattagcattaacacaaataaccttgcacattatcaaataccaggcaatacatgcagaaagcttaagaacacatgatgctgctttgaggataaacaaatgaatttctttttctctctaaaaagtacctcaaacgtgaagcttaaagaactaggaaaaagttatttagtcaaggctagtgaagatataggtacagaatgagtttttcttgttcctgagcttggtttttccctgaaacttgttgccttatctttctttttttaaaatgagaaataaaaaaaagaaaatcctcttttctcaggaagcaatgctagtggaagagtagaatttttaataccaatcatagtcaaatatcattctcagacatagagtcagaatacgggcctttaaaaattcttcatgttggcctgggtgtggttggctcacacctgtaatcccagcactttgggaggccgagctggacggattgcttgagctcaggagcttgggaccagccagggaaacatggcaaaaccttgtctctacagaaatatacaaaaattagctgggtgtggtggtgcatgcctgtagtcccagctactcaggaggctggggtgggaggattgcttgatcccaggaggtcgagtctgcagtgatttgagactgcaccacttcattccagcctgggtgcagagtaaaaccctgtctcaaaaaacaaaacaaaacaaaacaaaacaaaacaaaacaaaaagcaaaaaaaaccaacccaaaaaacaaacaaaaaacttcgttatccccctaagcacacatatcctggccatgttcaggatcagaaagttttcatttcttcagcctagatagtaagtattggtgactacatagaagtccttgtggtatttactgtatatctttggtagtcataattcttcctgagcaaaagaaaggtctgcatcaggtcttactttacattttttggcatcataaattgaaaaattccatgttgcatgtcctgtgtgaggagagtttatgcagtgagcgaataacctgtccttctgcctggcactggcatcccacctttcttgctgttatttatgcttttgagcagtaactttaataaagagggaaaaatctaaacatggtctctgtgaaaactgttctctcaagaaggtccttatagtggcatattaattttctgttgctgcataacaaatgaccaccatcttagtggcctaaaacaatgccgatttattatctatggtcccgtagatcagaagtctgggcacatgcaaaaccaaataaaatacttacgaatatatttaaccaaggaggtgaaagatctctgcaaggaaaactacaaaacattgatgaaagaaattgtggatgacacaaacaaatggaaaaaacatctcatgctcacggattgaaagcaatctacagattctatggaattactatcaaaatgtcaacatcattttttgcagagttagaagaaccatcctaaaattcatatgggaccaaaaaactgcccaactagccaaagcaatcctaagcaaaaagaacaaagctggaggtatcataatacctgacttcgaattatactgcaaggctatggtcaccaaaacagcatggtactggtattaaaatagacacatagatcaatagaatataatggacaacccagaaataaagtcacatgtctacaaccaactaatctttgacaaagccaacaaaaacatacagtggggaaaagtcaccctactcgataagtgtgcgggggaaattggactgccatatgcaggcacatgaaactggacctctatctttaaccttatacaaaaattaactcaagatggattgaagacttaaatgtaacacccgacagtataaaagtcctagaagaaaacctaggaaaaacttttttggatattggcctaggcaaagtatttatgaccaagacctcaaaaacaaatgcaacaaaaccaaaaataagcaagtgggacctagtaaaactaaaaaccttctgcacagcaaaataagtaatcaacataatgaacagataacctgcagaacagtagaaaatatttgcaaactacagatacaacaaaggactaatatccagtatctgcaaggagctcaaacaactcaataaaaacaaacaaacaaaacaccagaacaaccctattaaaaagtaggcaaaggacacaaacagacatttttagaggaagacacagaaatggcagataagcatgtgaaaaaatgctcaacattagtaatcatcagagaaatgaaaattaaaaccacagtgggataccgagttatattagtcagaatggctcttattaaaaagtcaaactacagcagatattggtgaggatgctgagaaaggggagcatttatacactgttggtgggaatgtaaattagtagaaccattatggaaaacagtatggtgatttctcaaagaactaaaaatagaagtaccatttgatctagcaatcccactactgggtatctacccaaaggaaaagaaattattatatcaaaaagataccttcattcaggtgattatctcaaccctgttcacaatagcaaagatatggaatcaacctaagtttccaatgacaaatgattggataaagaaaatatggtgtgtatgtatttatatatatatgtgtgtgtgtgtgtgtacacatatatatacacacatacattggaattctactcagcaataaaaaagagtgaaatcatggcttttgcagtaacctgtatggaaccattatcttaagtgaagtaactcagaaagtcaaattccatatgttctcacttataagtgggagctaaataatgtgtacacatggatatagtggaataatagacactggaggcttagaagggtgggagggtggaaagaaggtgggacaagaaattacttaatgggcacaatgttcactcttcagatgttggttacactaaaagcccggactttaccactatgcaatctatccatgtaacaaaactgcacttgtaccctctaaatctattaaaaaaattttttaaaaagtctgggcacagagtagatgggttctctgctcaaggtctctcaaggctgaaatcaaagtgtcagcatggctacattctcatctggaattcaaggtctacctccaagttcattcaggttgtcagtgaaagtcaattcattgtgaatataggatttaggtcttcattttcttgctggctgttggctgtgaccactttcagcaattaaaggctgttcttgggttctagccacatggtctcctccaagccacatggcaggttgctccttcaaggccagtgggagaatctctctcttaaggactcacctgattaggtagaggccatctcccttttgaataactcaaagtcagctgatctctcactttaattatatctgcataattctatcatcattaccatataacataacctaatcatgggagtgatagcccatcatattcacaggctctacttctgctgaaggggagaggactacacagggtgtgtacaccaggggttcagaatcctaggacatctcagaattctgcttcatacaagtaatatgtttgaatttgaggatttgagaaggtcactagactcagcctttgtgaaagcaacgtttctcctgctggcattgtagaagtctgttccatgtttttctgggctccatgtgtttcacttaagtctaaggaatggacctggcctggatcatgtctgttcctggagactttactgaggctaagtgggctttagcttccttagaggagttcaagtctggggtggcccctaagcagttcactccatgaagtaatccgaagtcttggtagaatacccagccctatattcagtattaaagctgggacatgtctgatgtcaacaagaagacagggagaagacttggccttatctggttctgatcaaaatgtaaggaatttgtgtggaataaccctagatccagaaatatgcctagtcagctctttgccctcagtgagctgtgagcacagctcctctaaagaggcaggaaaagaagaaaagggagggaaccaccaaaaggacctaatttgttagtgttaatcggaggcctacccattctcctaattgattgttcactacaaagtagcttgatgcttctttagcctgggagctaaatgtaatcaacttttgtttgtttctgtaaaaaaatttttttttgcccttgaggagatcattatttctattgtatgaagatggtagcccaaacattagaagtaattagagcagatggcagtgaatacttttattttaaaatacactgaagctcataagctggttttcattctctgggcttcttcctttttcctctgccaccacatatccattttgcttcccttcaggtgtaaagacaggaaaaaagcaaaggaggaaaaaaaaggtttcctggtgtatgaaactgcggagctgtcaaacgttcatagcagggaaagtacgctcctgtgtattcaatcaccgaaattaagtgttttcgaaggcagtgccgtcatgggtccattgcatggggaaataacatgttgtagtccatcacttaaaatgttaaccttgtctcttaatagtgactgggaacacaaacacgtgctccatgctcgctggttaaatggcagtgtgttagcttgtgaaaaaggctagcatgtatctgtcaatcttctgatctggctctgtgtgtgtgtgtgtgtgtattcatgtgcatgcacgtgagtgcgtgagtggcatacacacacacacacacacacacatacacacacacacacaacttcccacacttccacttgcctttctgtggctttctgagatctggcttattgtgtactaaaaaatgggaagaattgaatcagtttccagtactttaatgtatatccttcactaagatgtttttgtttgcagtccctcaagtctcaggtagctgtattataattacctattttcaattacagaaagttccattttgcgcatgttttaatactgatgtactatagatacactatactgagcatattataggtactatactgatagtatagtatgaaacagaatttaccggggtccccaaacttttcctataaagagccagatagtaaatatttcaggctttgtgggccatgttgcttctgtcacaaactgaaagcagccacaaacaatatgtaaatgaattgtcatgccgtgtgccaatatcaaaatagtgggttgtggactgtagtttgctgacctcgttatatgttactgagtgttttccttgattttttttttctatgacatatgaagaacttgatgtctacccaggtctttgtgcagtgtttctcattgcatcactagaaaggccatctggctatacagcgttccttcctccagggccagccgcctgatccttcaggctgcagctgcagtactccaagcacacccttttttcaaggtcctcctttgatagcctctggctcatactctacttctctgctcctttcccaatccaatccaatccaatccaatccaatccaatccaatccaatcagagcagtctctgatcactccatatcaaatagctcttcctaccctggcacttctgatccacttcaccctgtttcttttttacttcagagcacactattagttttatatatttaacctgttatctccctaaaatataagctccatgaggtcaggaatttgttttgtgcctggtgtgtagtgggtgctcaataaacatttgttgaaggcagggatccatctactctgtagttcctggaaagtagtctgaaaagagtctgtaacaaaatgagataatacctgttaagtgcaccccgtaagtgttggccattattattaattaaactttaagtggaaagagtaatacctacattttttagttgtgagtatgaaaggaaaataaatcttggggcctcccaaatcactaagctaaagggaaaagtcaagctgggaactgcttagggcaaacctgccttccgttctagtcaaaattatccctttgctcacagagatagatgcagatctgattgcctcctttgtaaaagctaatcagaaacttaaaagaatgtaatcatttgtctctcatctacctgtgacctggaagtccccctccctgcttcaagttgtcctggatggaaccaaggtacatcttacatatattgattgatgtctcatgtctccctaaaatgtataaaaccaagctgtgtcccaaccaccttgggcacatgtcatcaggacctgctgaggctgtgtcatgggcatgcatcctcaaccttggcaaaataaactttctaaattaactgagacctgtctcagatattcagggtttacataaggattagtgatactgtaagtaaaatgtatagcattgtgcttgggacattagaaatattaagtaatcagtagctatcattatcattttttctcccacaagtgaaaaggtctttggacttaaaattcagaagagatactattagaggagatttgaagattcaaatagaggaaacgataaaagaagactgtaaatttgtcctgtctgcagactttgaaaatcctctgaagcttaagagggctaataacttagatatatgaagcactgaggtagagtcagcaacctttgagaaatcgcagaggataggaagtgtgtggaaccaagagataagacaatgaattgcctggttttctaatgatgagaaagggtcaatttgaactgggcaggaatctctgacaaaaagtactgttgacatttctttgagtagtcaatgtgctacacagtgcagtgtggaaggacattctcatgttatcttgtaatcatgaggggtttataaccaccgagaaaagaaagtgatcacttagagcctgcatgaggtcagtaagaataaattataccaaactaattcaatttcctttttggtccctaaagagttattagattataggttaggggctctattcataatcctggatttgtagatagttgacttttctacactatcttttgttttataatcagctgaaataatctcagcctgtgtcatctgttgtgtccagattaaaaagagaaaacgatgtttaatgcacttgatttcccctgcaaggccatctccactgtggtcagccatctaatcctctgaactcccatagcatcttggttatgcctttaattattgaatcaatcacactttaattatctggctatttgtatttttctaaatgataatataagtaccttaagaacaaggatgaggtcacatttatttgggagaaacgcctttatattagctcatacaaaaggatttgggattttaattggccaaaaggtttaatgtcattgaacattataattcaactgttaaaatagccaagagtattaattgggagaataaatgttatttaatgaatggtatgaagacaatcagttagctatttgggggaaaaatagcaaggaataaaaacaagaaaaaagtataaaactttccatcaacataaattgtaagttagttgaggagtaacatgcagatataaaacccaccaatcaagaaggacatataagtgttatttatgtcagggtgaaagaggatgtttcatctataacataatgaagaatgtcacaaaaaaggtaaataaagttggtttcgtaaaaattaaaacatttcaatgtaaagaagaactgaacaaaattaaattatagcttcatatcatattatttcagttattaaagatttttcattatggcatcataagtccaaataagagttgaccatttattcattcaaacatatttttggggtagccaatagatgccaggcattattgtaggttctagggatacagcagaaaagcaagacactcttgtgaagcttacattctattaggggttgactgattataaaccagtatacattgtattaggtagagatgagtgctttggagaaaataaagaaggatacggagtggagaaaatggttacagggacttgtcttttcctatttccaggatttggatgctgaggaagaagacattttggtgaggtgtcagaacagttatttcttgttcttgtcagccaggagacactgtgattacagagattcccatacgccacctcctctgccaccccagctcaatgcatacactcacaaataggtctttgctttgccgggtgttccaacttgctgatcaatgacttctttcaagataactctggtggtgttgcaagtacatttaaggtgacatgtaagatttgcagacactgcacattccctgaagttcagagaagtgctgacatgctgtaagaagaaaacaaattgcataagcttcctagctgaggcaggaaagtttttttctgctttttttggggtttatttggggctagatgcaaagatgaggtcacgttctgggcaattcttgtatctctattttcacggctgcccccatatgcctatgaggaattgattttcttcatctgcagaataagaatgagtgatgtgtttatctccaggaagaacactaaagctaaaggctgagcatcatgggaactatagaggaaagagcttatattaggtggaagtaagctgggctgttgacacggaacatggccttcaccaaaaatatgttggtatcaacagagacattctcaaatatattcacaaaatctttaatcaatgctgttggcattttttttttcttgattggatcaaagtgacatggattggaggatgaagatgttggaaggtgagccatcctcactgtttcatggagcatttccctgggagggaatgatagcaccagctctgttaactgaaaatgtaggagagctaaaattcttatggcaacgtgcatgtaatcatggattacactgataacttgcaatcatagagatatgctgctcttctatttccccaggtagctggtaagcagtggatgctgcagtaatttttagattttttagtatttagtaattattttgtgtaaaagcatgagtacatcaataaacatttatacatctcaagatatctttgttatgctaaggggaattcagggcacaaggaaacttaggtctcttgaaactgaatgcttaaacatctgtattcatttgaaattggccacattgactagagaaacttaaggtgaaagaaaaaattggtggaagattttatgagatcgaatctgagtctcaggttccaattaagtagcactattcatcatttggtttatgtttaaatggagcttgaaaacacgaaaagggatgtaaatgtttcagaagacctaggggatatagcatttttaaggtcttagcacctgtatcttcacctattgcattaggaagagatgtgtgtgtgtttgtgtgtgatatctgtaaaagcatgtatggcaccagcaggtataagattcatttaataaattattcaaaaacatttattgagcaactactatgtgctagacatcttttagggaggtgggaatatagcaatgacccaaaccaagtctctgcttcatttgagtaagcttagtaagtgataaccaaatatgcaaggaattgtattatttaatactagaatgaggcattattaggggagaaggaatgaaggaatgattgggggtgctttttaaaaataataatacaggtaaggaggtgatacctgagcagaggcatgaattaagtaagggagtgagccatgcagatcttttgggaaagagcatcccgggagaggccatggtaagggaaaaacttcagatgggagcttcctttttgtgactccagtttgcctccatcactatgaactttgacacatcatttaaacactttgagcctttgctttctccactggaaagtagagataacagtatttgacctttccacctactgggttgggaccaagtatagcaatctttgaaggctgacaggctaggccaagaggttatagcacatggaaggcagcaaatggcataagcaagtgcttcagagcaagaaagtctctaaagcttattgagagctagataacagatatctgtgctaatcataaaaatttaaaaatgttctcaaattaattaatggataacaccatgaaatagtctacctttgacccacttaaatatctaactaatgtctagttgttcccgatcattttactgtgtgtgtaatgagccctggttttcttcatagttctgtggctgggttatggatctgaccaccaggttaatgtctcagaaagcgttatgctgctgaagtcttcatatttcttacagttcatcaacacatcattcttcctagcttgctagtctttgggcgatcctggccaaagaccctaagctttggatgttggtttggagaaaacatcttggttccttttaaagatatatctccttctcctccagcccttgctctgaattgatccttaaattttgatgcagaagtgtcatctgagaggatcattaaaattgtaggtctctgggtcccaattcttgagcttttgatttcacaggtatatgatgacactagagaaatctacattttattaagctctaaggaacactgcctaaaatagcatctgtaaaattatgggataggattttgctagagtcctttccatctctgggcttctggaaatccaagagttttcaaatgtccttttatcatggactcgcagctgacactacagataacctggttcaccctgttctgcagtttactttaccatctctgtttttcccaccttctttcattccagtttcctttgatttgcctccctttcctctttctgtattctacaggagtaaattaaagggttataagaatgtataatatatatagccttataagaagtactgtttattattttaccaacctaaagctagtcctatagtgaaatcatctagagttaaaattctctcctacttttgtagcctacagatactgcagttcacaacgatgctcctggatcacctattcttttttctgtgatactggaactggttatcactatgccttatttccttccatctcttaaattgtgatgagtcatagacttttacttctttgcagatgtagaaaacgaataaattgcaaagccttctcagtgattgtgttgggtctgcaacttagcactgttgaccttggggtttgtatctttttctggaaaacgtaacggctcttctggcaacacaattttccattttctatctcagaaatactatagagcactattctctgtgtaggtgtagttgtcggtattacaaacatgccttcccttctaatgatcttctcccatctgcctctaacacatcatgagaggaccttctaggtggtttatttttataggaacttgggcttcacatttgttggaatctgaatgggaagaagactggagagagtggcttatacatgtcatatctattaccttgaaggaatcaccttctctattgtgattttattatgtttatcgtaattatacttctacaacttcacaaggcatttagacatgttaccagcctcttgcatgagctcaatattgctttctgtgatttttatgtccctgttttaaaaaacgtatgacatcagagtgaccacaaattaacaggaaagccaaaagttctgagagagggactgaaggctggggtggagagggagtgcttccttttctggcttcttctgtcagtacagctccctacccctcactcaaatgttccagactatttacttgtcatctgaagtcagtcggcattctgcctatgcctgcatgggctttgttcagccctgatgcaccaggcacagggggaaaggcaacaataatatcaaaaaaggccgagtgggaggatagatctgagcacttaggaagaggaatgttcctataaaacagggactcttggcagtagagccagtgaaaaatgataccaattacataaagcaaaatgccacccatcaagcagaacattttaattctccctattccaggctatttatgactttttgtccaagattcaatacatatctgtaaaaataaatggaatcaaactcatctgttaggtagaatggggcctgtgctagaggggaaaaaaaaggcaagaaaacattaccagcatgttattggagaattccaggggctgggcacagaagaacttcaaatataattttgcctctcatgttttttcctgtttaggttagttgtatgaaaaagagagaggtaaccaattttatggagacatttaaaatatttaaattaattttactttctttgagaagtttctattttgattcaatacttatactatcccgcccaaaaacaatgaatgaaccaacaaaccaacaaaccagcgaaccaaccaacgaagcaacagaccagccaaccaaccaaccaacccaccaacccagctctctgttttccagggcaacttttctttacagttctgccggagatggtccaggactcacagctggtttcctgaaaggctgccacaagatggcgacaacgtcacagtggagaatggccaattgcttctgctggacactaacacaagcatcctcaacttactgcacattaaaggtgtgtgaagtttgtaggttggtaatattattctatatgattatatcacttgtaggggggatggaggagggaaactttctggataagttccagaacttagttgacaatttatcctcagaccaaactgaaattttactatgtaaaggaagaagtggtcagagggttcaaagtgaaaggcctttctttggactcattataagcacagagcttgattagtttaatttttcaaaaacaagaaggttaacagtgttctcaaagaatatgcttctttattcaagcactttttagtcatgcttatccaggacagcccccacaatatagcaaaatgccctgaaattggttaacgttgctgcctttgaaataccctgccaagaaagccatgtcttcctgcttttaccctgttgtggttttgacttcttggtcccatggaaagtcatataaataggctttcttattgcaaaaccggctatatagctctagggtttatgaagttggaagaggctgagatttcgaatttcaaccctactaccacatcttcaaatggctaagtcagttatttcacctctttgtgcatttctttccttatctgctaaatgagaataaaaatcatggcctactttagtggctggaaataaggaatagttatcaaaatgcctctgttcattggcaaatgaaaattacatgggagatatgattagttatggatctctatgaaactctgcactaaaacactgttctttactataaatatatttaacacacaaacattcatccttattaagataagaatatagctacatgaggggaaaaataaaatattttaaagaggataaactaatggaattttaatacctgtctcttttagaccgaatcaggatttaggcattttgtcattctctattctggaagctgttttttttctcttctatagcaaggagaagttttcagtcaaatcagttaattagtgccctttaggggataaaatggtctgtcagcttgggctcttgccctgtctttgtgtgtgtgtgtttgtgtgtgtgtgtgtgtgtgtgtgtagctagtggctatgggaatgccactatagacagtcatcaactacctaaggaccagcaatgacaaaggaaaattacagacctaaagcctcatttcagagaaaagatactcttggcaggcctttaaccagggctttctccatatgaatcaaattctgcaggagtatgggctccccttcaggcattcaaaggtcttggccttatattgctactaccatttgggagaagtttcccagctgaaagtcttggattactaaatctctggatgtactgttacttccaggtaaatcatgaatagtgttgacagcaccagaggctgaaaacagagaagaggcatcagaaggagagaaaagtgtaggagaaaggcaggataagtataacattcatttgacttctcactcttaaggatttaaatatctgagcaatcccaatacttgccccaacctccaatagtggtttttcttagcatttctggtttaggtaatatttcactctcatattatttagataagtgagttaggtttggaaaggcaaaccctcatcctgtggagagggagagtaagtcatctgaagggtctcttctttctcttggggaggaggagtaggtaggatgtaaggctaagtagtagattccagtttctgcacgaataagatacaggagttgttggcaaaagacagagctacctagagtgaaacgctgaggtttttatcatagagatataggtcataacttctagaaagaatgagaacagggcaaggacacagatcaaattttgttcaacagataatttgtgaatgcttattgagtggcctaggattcctgtgtgaaatacaagaaaaaatgaagaataatactggcagtaacatgtaatattaccaaagaaaaataattagaaagtaaatgtaaaagactaaaacttctggttctaaaataagtgatgctggcagtgaggccgaatgtatactggggtaatcttggtgtcagttgtgtaagattagagttggagagcggagaggaggtgaagggcagatcatttgtgtctgagacatattgcgatcacatagatattaacatatacacaaatcaaagtttgaggaaattctccatctcacttactggaattgtatacatccagtggctcagaccaaaaaccatggaggcatccatgacttctttctttcacctcctatgaccaccccatcagtgaaccccgtcggctggatcttcaacatgtgtcccatgtagcaacacttcattggtactaacctagtcttaaccaccacatttttggcctagaccatcttaaattgcctcttattttgttcccatatttcagattccttgttttcattagtagtaaaaccctaatttcattggtggcaacaaagtactcagctgaaatgctctgtttcctgaacacttttgtagctagacatagccatgtggctaagggcttaccatgagatagaagaagtaccctgcagaacatctgagaaatttccaaaagtagagatgacccagtaggaactacaccctattttcccttccttctttctctttcctacttgctggtatataaatgtaatagcaacattttcggccactattttggaccatgatgctacttgttagttagaatggaaaagcggaagaataggacaaacccaggaccctgatgactctggagttgccatgataaggcattcaaccacccacctctgaaataactttttgtgacaggaaaataaggcttcatgggtttaagtaatggatatttggcttttatgctatatggtaaagtaaacccccagcagtttatggtccatttcctttaaaaatttaagtcaaatctctcctcaaaacctccagtggaatctcaactcactgggaatcaaatcactggtccttactattatttaacctctgatccccttgttgaccttgtctttctcattcactctgctctagctcttctatgaatatacctgcctcaggacctttgcctgtaatgtctatggcctggaatgctcttcttccacattcatgtggctggctcacctatttcatttgctctttgagaaaatatcaactaatctgggaggacttgctggccatcatttctaaaattacagccaccccccaggactctttatcctttgatgttgctttacttttcttcatagtacttatcatcacatggtatattatcaatttacttgcttgtttatagtctgtctcctctactagaataagctcaaaaaagacaaaggatttcatcaatttatttactgttgtctcttcagggtctagaacagtgcctgatgcatgacgaaggctcaaaaattttatgttgattgtagaaagaatggacaagtaaatggtcctgggtgaaatttaagaagtgtatattttaaacccttgctctcttaaataccacttttcccagctaatttactttcactgtccttagttgttctcactgattacacacacacacacacacacacacacgtatgtataagtacacacatatacacttacatattcacatatacatatttacacacgcaaaatatgtacatacacacatatgtctatatatatttgcatattatgatgaattgttaggaatataaaatctgttggtaagttatatttctgtttctaaaaggcatatgaccaaagtcttcactggtgaagaactacaactttcaaatatctgatcaatgtaacatagctgtaaacctcttttaatgtcttcccttggtctataatatgtgtgaaagtacttgaaagataataaagagctcttcaaatataagattgaataatcacaatcatcatcaacaacaacaacagtaactcaccctccaaatattagttactatctttttcatatacattcacagtgtcagaaaaatagctgagtgaaattttctttactttttctgataccatctgcaggcttagataaagcctgagaaatttcaagccaaaaataatttcttcaaaagattttaaccgacaaaatatgaagtattataatggaagtactttctcagccatttctatattacaaagaatacattctacatgaagtatatatattttgaaaggattactgctaagtaacagtgaaactagatcacctaagaactacatttggaaatactttatgaaggtattacatcctttatattatttttccattcatggaagccagcatcctgatatgtagaaaactgggctcgtacaacaggaaaaccaacactttatggaccctcaagagtcttgaactctctgtgccttactcatattttcatctataaaatagaattgacatttttttcttacacatattacttatatagtagaaggcagggtcataaatttttggggggcaattgagaagtggccccaatgttttgtgtcattatttatgatgctatatgtactgactcccaacttaaaaagtagcagattcttttgtgactgtgataagagcttcagctgcatttattattttattttaattagaaaaagatccagaacttttgtctacttactatctctacttcttccctccttcctgccctccctcccttttttaaaaaaaaaatattttttaggggcaccgttaaacacaaaagagaattaacccaatcaattaatactaatgagctgggatggaaataggcatattgccttgatttagttaattatattttcattcttttatgttaagatgcccaatggccataggcattgctgaattaaaatttattatttttattccaagtaattatgatgagccataatcacaaagaaggaacgttaccctcttgtcagagcattctgcatcccgggcaaggatcttgggttgtggtctgtagttggggaaacattcatatttcctgaatgaagcaatgaatctctttctgatctggtcatcaagcagcttgatgtgaagtagtgtaacgataatgattaatgaaagggtcaattaggggagaatgaactctctccttggtgttgagctgttaggtgtaggtactcctatcacacacacacaacacaaaagaaggtaactgtgaagtgattgatatgctaatttgtttgactatagtaattactgcattatatataatacatatttatccacacacatacacacatgaaaacatcctgttgtttgccttaaatatatacaataaaaaaggaagacagtttgtagtttcttactactcacaatgccagtgcttgtgtctgagcagaaacttgtttccagtctctgttgctgcttaatagtgcactggtttcctttaatgtgattttctattttttggtctactggcttatactaaagcagttaaatgcttggcagtatttctagccacaaagaactgagcctgaatctgggctccactacttcccagctctgtgaccttgggcaagttgcagaccttctgtaagtctcaggtttttcctcattaaggtgatacctggttataatgacaataatagtaacaatgagagctagcatttatcattgttgcatggcaatatcacaatgtattgcctgtctcgtatggatgttttcagtattaaatgaggggatatttgtaaagccattagcacacagcctggtccagagtaagaactcaattaatgctagtttttgttacttttggactgtcagagataacaggagatatggctgaatatcaggcttaagttacaattttatttacagatagtggctgcttctatatacaaagcaaactggattactgaaagaattagctgggtaataaagaccttggattgcttttgcttctgttatcttcagaatgcatattgaagtgtttttccttctattgcgagggagggacggatggagaagtggatccatttgcttgccggcattctccttgttactttgacttcacagaaacatgtttttctggtgtagcttggaacatgatctcattttctctcaactgttttttagttcacagttttgaggacattcagatctttttaagtccattacatctggggtttctatgtcatggaaatgcatattcttggtttattgaaatgaagcatcttcttctgactcactgtcaggttcattgtagaattccttcatccttgacaagcatttgaggatttcagagtgaggtattaaatgatgaacctatcacagccttttttttttttaatcccagggattgtatacttggttgcttctagttagcactaagccagcctcagattcagtagatgcatgcttcagataatgctttccaatgcagttatctagaaatgttacaacacagaactttcctgagatgttgcttgtgatctctttgtgcatcaggcctgtgtgagtcacttggcattttaccctctgcctatagtttcaagacttcatagctaccagttaggataaaacaaaatctgaaggaaggcagtaattttgataaaaatatgatattcaacaataatttgttttttttctctaactgtagaatatcttggtcaacaggagagggttttgtgggctggaaacattgttgcaaattggtaaattcaaaataatttatctgcaagttggctgtaaaagaagatggactgaattgccctcttttgtagtcaaaacgtagctacccttcaagccagaagataggatgcttatgtgcagacaatacaacaaggttgattcattgcagtttggtcagcaaactggagcctgacttcaaatttgagtcagtcacagactcttttatggttttgggtaaggctctggtcctcaaatcaatgcacaaaatggaaataatggtgattcccttccctgtgtagggagaaaatgtcttgtataaacctctactggatgttaatgttgtttgtgtgtgtgcaactctgtggaggaagagcagtataggaatgagtaaattttcttcctatatttggcaggcatggtaccctaaggggctggtctgtgccattatccagaagggaggcctgatgaagaagttagcatcagaactagcccgagtttttttgaagttcactcttaactcttgggtgtcttcatgtgctgggcttttcttggtgacaagtaggtgttacttatttcatgggaggggaactttgctgatattcaaagctaagtgtatcacaggtagaatttttaattggttaaaaacttgaattatttttatattaattatttacaaatagaatatcaaggtgtattttttcttccctctaccattttggaggcttataaaggtctaggctgtaagctgaagaaaggaggggccagctctgtttttgctcacctttgtgttgccagcaccattttatctccaggcacgaaacaggtactcaaataatggctgaatgaataagctaataaatgagtttcagacctgaagaggcagattcatgtttgttgagaatttctctataatcagagtccttcctggtaccctcaaatgttagtggattagtccagacagtgaccaattttatttactatttgtgtatcaggagatcagagacaaaggctttttaatgtgggggacacttggctctgagaccccttatttttccaatcagacaatgacttacattatttacctccagagaacagtcccagacacacttgattagccttaaatgaaagataagccattgctatgagaaaggacatgctttcaatagatgggcagacagacagatagatagatattaaacaatttacagttttatgtcttgacaacttggatattgtaacatgaaaaatgctactgaaagggaccagtcccttcctagcagagaagctataatattttcagtaatgaaagataaatgtttcaagcttccttacttaaaacctttcattggctttccattagcctgtaagttcaagtccaaacttaatatggcttatagggtcatgcaggacttggtctgtctttacctctccatctcatttgttcattaatgatccctatatcctattcatcctggactggaagtggagctagaaatctgaagtacttttgtatttgggattcttgtgtagataaaaatatgttggggactgagcatttcattattatagtttctatacaatattcctggggtcaggtaaaggtaggaagtactgtattctcatttttaaaattaataaatactataagaaaagtattgtttgcttttatttccaatactattatgctataccaaatcatttttataatattcagagaataattatatttggaaccttttgaaaaaacaagttgcttagagaggtgtatcaaattgcaggctggtcaaaaatgagattgggtcagtgctaactgaactttgataaagagaaagaggaagattatctgaatgaacttagtagctagggggatttttacatgcttggtacagacctcgggaaaaagacgattttttttttgtcttttctatttctccttagaaatagctttcttcttgagattttaagtgactttttagaaagccatggaacagctgaaggccttgagcacttaaatgctagaagctttgttgataaaataagtcatggttttctagatgtagaaaggaaatcaaagtttagttaggtagtaattgataacagtagctataataacaaaggcatttacttatatcttagtgtttgagttcctttaaatatttctgtgtagtttgccttccacagatatgtttacactctgtaattagtacagagttaatacagttataaggttaccttaatgagtttcatattttgtagaaaaagtaaagagctgagtcacagtctttatattctcttatagtcatctctaaagtgggacaattcactaaaaccaacacatttccattcacccggaggagcaattcaacttcaccgtgaccttcagaaactggagactctattttacatttttatttcggtacctagcagaggagctggaaactagtggtaaatgttggttgagtgactaagggaattattctataattccaggcttgtattttctcagcctgtttcagatgatgccaaacatcaccagcctacggacacctagaacaatcacttaatttactgatagtagtgattctcaaagtgtagcccccagtcagcagcactggcatcacctggtaacttatacaaactgtaaatttgggagctctacagtaaacctactctgggaatgaggcccagtagtctgtgttttaagacatccaagtgattctgatgcaggttcaagtttgagaactactagcctaaaacaataaaaggagccctatggaattgtgaggaccagaagccaattagcctggcccaactactcatttcccaaaggctatgagacctttagcaaagaacagtggaaacttggctggccacattgaatgggcttatcttgagcacagcatttttagttggatgcacaggtccctaccccgccagggaaatctgagttgatgaaaatggtttctcccaactgctattgtttgcagctctgagtcagtgattttatttcatatatatatatatatatatttttttttttctctatattgcccatttgactgcagtaccaggctaattaaggaattagtatgtggcatccattctggggaggtgtctgattcttgtcctgcatcctgtgaacatttttgcaaacactttctagttcatattttctttttttaatcaggcagagacattacaattaaaataccgttaaagtgattctggcaagtattgcaataagcatgttttttaattaaaggaagaacagggagatgcataagcagtatcagctaaaggggaaaatttcttctgatatctattttaattgaaattttgaaaaatgggaaaaacagcagcagcagcagcctctgcttctgtgtgtgtgtggctccatcccaggttgctaggtttaggtattctgtgcttgattaattagtagccagccagagagtccattccctttgcccccaatccttaaagcctgatttatgcctcacatcccccatgaatatgtgagggctcaggcatctatttcctgagctgctagtggataggattatggagcgtggactaagctcttgggggctctcgtttgccagccaaattgattttccgcctctctggctggggacaagcccacctcgaaggcttcccaggctctgctccagtggatcaggcacaagtctaatccggatcttgccaacaaaggaagctgtgtccatccgtgtcacaatgcaggtttctttgggctgtgggtgccttctctaaatgctcctctttcctcctcttcctcaccttctcctggctcctgctcccagagcagcacagtgcagtaaggtacagggatatactccaactctgcccagatcactcagccagctctccttacccaggcagagcaggatttgtccatcttgaatggatgattccttttctccagggaaagggaattccacaggcttcctcgactatccatttgactatttaataattgaaaggtaagaatatataggctgctaaattttttaagaaaaaatggtgaattgggggttaatcaatgtaggcaagtaaattagtttacatctaaaaatttagatagttcaagctttgagtaaatgaattatctagcttggtgatacagattaatctaatgaattggggttctcagatccctccctggtcttgcctccatttacctctcatttttcctctgtttaaaaatagaatcactctccctgggtttattttatcacctgacattcacatcctaactctgtacatgctggctgtgcaccttttctctcttgatcttcctaaaaatggcattaagggtttgacacactcatctacctctttaacagttcttaaggctcttcgttgagcctatgtctacaaccttatgatccttctaactcacctaattctttgatctgctctcaagaatcttgtttcttattctagcctttaaatgttgatggttgacagttgtttccctacctttacccaccttacctttcttctgttcttactctacatgtcctccctgggagacctcatttactttgataatttcaactcctcgttattcaacaagtattgagtgatcacttaacacgttccccatgttccaggcacagggactatggctgtgaacaaaacaggccaaaatcttgctctcatggtgtttacttctagaaggaaaacagtcaataaacaaaataagaaaattatagtttttgttaaatttgcttagtaccatggagaaaaatgcagcaggagaggtgaatagggaatacacattggaggtggtagttggggatattggcacacagcgatagcaaatgttgtgaggcaagggagcaaaaaggagtattggaacaagggggagagcagaggcagatggggccagagagaaccaacgctgtaaggtttgataggctttgactctaaatatgatgggagccattgaagaattttggcagagaggtaacacgatatggttcacatgaaaagaaggaatgacaacactgagtgttgttttgagaattaaccctgaggtagaggataagggcagaaacagggagctaagttaagatgctgttacaataatccatgggtgagatgagagtgacttggaccccagaagtagatgtggaggtggtaagtggttgggttataggggacgttttgaaggtggaatgcatacaatttcctgaagtattgattatggagtgagagacagtgaaagttaactctgtgattttcagacttagcaattgcaaggatgaagttaccattcatggaatgggaaggactgagggaagatctgtggggcaagacaaggaaaggagttcatggatactcatagttaagaaactatgagacatccaagtagagatgttgagtaggcagttgggtatgtgaatcttgagctgagggcacaagcttggagatataaatttgagagtcattgacaattagcgtgcgatggtgtttaaaaccttaagacaagatgggacaactggcatggtctacagagactgataagaaacgtgtttagagggctgaggcttgggacccaccaagtgtcagtggttgggatgatcaggaggaatcaggcagaagaggctgagaagaggatgcctaagaagtaagaggaaaaccagctgggtttgtacccaacctacttaattagaaaagtcccatgtgctcactgtcattgagtcaatagggagctttcttagtatttgctaaaaatgaagacatgaaattagataccaggtgaaggaaagacaaaggttctaaatagaagagtttattcttctgttcttttatgagttactagcacttttgcattttatgaggttttctttagcgattcaatacaatgtatagaatatagcacatgatgaaaatttgatagaagtatagaaacattggattttttaaatagagatgagaaaatgaaagaaagaaaaacaaagaggctgggcaagtgaggagagggagttttaggaaagaagtgaccaagttgtcaaatgctgctggtcactcgggaagggtgaggactgagcattgagcctgagattcaccaatgtggttgccatctgtggccttgagaggagcagttttgcaggttcatcaggtaaaggcctgaccagggagggttcaaaagacagtcatgaaaaagagttgaagatagtaggtatagccactcttttgaagactagtattgtatggtataatatttatacttaaattttttctgtaagggggaaaatagaattgtgtatttgttttcttaaaaaaaacaacaaattattttgtggttattatagaggatgactaattgttgggttagccaaaagcagattttgatgtactttgcaaacattagctagctgctaaaagtctcttttacttccctttaaaagaaacaaaagagatgtttaatggaaagaggtgattacatataaaaagttgtgttcatttatttattttagagggaagtaacaataatgatggttgattgatttttataaaattacccaaggttacttgtgggacatagtcagctttcatgaaagtcataacaagcaatttaagggtcacagccaaaggctgatttcagccctgctctttatttcagcatttagaaatggggtcaagctctataaagtatggaataaagtcctcccacagccctcccatactcaagtaactatcctttaaagcagcccactgtatatttattttaaactaataaagtgtgaggatgaaaatcttggtgccttggcataaagatagattaagtataaactttatcttctttcacataaagaaggtttcatttgtttatctaattatttcaggcaaaaatagctgaattcctcatcaaactttcttctaaatgtacctagattttcttatatttgccactaataaagcggggtggggatgctttttagcaggagttaatgatgttcatattaattaattagtcctgtttatgacactcctgacaacgcagataattcattttctttgggatgagtttttctcccttcattagcatcattattagttcctgtcagtaaatgatgtttcaaaatttctaccaatttgtttcagtgtatttaacattttgcttcatggtaaaagggacaaagcccatgtttatatatttacccactaatccttgtaatctgtttcaaatcctttttggaaaaagacaaggtatatcttcattaacaaaattaaaataaatcatgtataaacaagccataggcaaactttcttaggttcacacatgtttttccttaaatgtaactatgagaacaaccctagtgaattgagagctactggggaaggtttgtgcaaatggataggatctgagccttttggttgggtagtcctgggttctagtttggttctgtgtattctgggctggaataggtatgaatgcctcttagccacattctgctctgtgaaataaagaatgtgatcttgatctcacagactggttttgaaggtcattttagacaatatatctacagattttggtacatggtaggtgctgaataaatgttagctttcttgttttccctgtagtcttatatgaattcctgactatgcatctcatatcttgcttaagaaaaaattcagtgattactgcagcacaggcagtgtcaggaaaacatgagccttgtgcctccattagtgtcccatgcacatctgactgcattcataaagatgtagacgtcaagtgttctagagttgaaaggaactcataattccaccttccactttgcggatgaaaccacagaccattaataggcactgagtaggagagatttgggacctgagtaatctgaggcccagcaattgtatgggacttactgaggctcattcagaggtcaatagcagactcaggacaggaaccttgattttgttccctgcctttaccacttgctcatcaaggtcagtttagatttcctgactatttacaatgcggcagtcctgtcatacaaatccatgttctaccagttgaatataattatttaggatgttaatgacatgtggctgtgagggaaaaattttagttaacataaaatttgatctgtagcccaggtcatatttcttccttcttgctcacactgggactcatgattattactgcatttctatgtaatgacaatgaaaggaaaaaagtcaaaattgttagggaatcctttggaagtctggtaagcagtgtggtactgctctggcatggagcctgtagactgaccttgctgctttaccctagagtatgaaatattatatatgacaaaatatttcaaaaggaccagtaacagagagatgttggatgcagatggtctagcagtgctcaagtggtagggcacttgtagaaattgagcaggttgtagatataatcacccggtgggttcttcctgccagttgcacagacaaaatcaattcgtcaagaccatggcgttgcagtaaagaaagcatttaactgatgcaaggccctccacaccatttgggggatggggttattacccaaatcaatctccctggaggctcagaggttaggggttttcaagggtagtttgttgggcagggaactagggtatggggaatattgatttgttggggatgaaatcataggggtatggaaaacagtccttgtgtactgagtctgtctttaggtaagggccacagcactggttgagtcttgggtcatgaatctgagtgaagtcagctggtggtcagaaatacaaaagcctaaaaaaaaatctcaaaagaccaatcttagtgtttttcactcgcatccatgcgaagagaccaccaaacaggctttgtgtgagcaacaaggctgtttatttcacctgggtgcaggtgggctgagtccgaaaagagagtcagtgaagggagatggggcggggccgttttataagatttggggaggtaaaggaaaaaggggggttgttctctggcgtgtaggagtgggggtcacaaagtgctcagtgggggagctttttgagccaggatgagccaggagaaggaatttcacaaggtaatgtcatcagttaggcaaggactggccatttcacttcttttgtggtggaatgtcatcagttaaggcaggaacaggccatttaaatatcacttcttttgtgattcttcagttacttcaggccatctggatgtatacgtgcaggtcacaggggatatgatggcttagcttgggctcagaggcctgacattcctgtcttcttatattaataagaaaaataaaacataacagtattgaagtgttgggatggtgaaaatttttgggggtggtatggagagataatgggcgatgtttctcagggctgcttcgagcgggattaggggcggcatggaaacctacagtgggagagattaagctgaaggaaggttttgtggtaaggggtgatattgtggggttgttagaagaaatatttgtcatatagaatgattggtgatggcctggatatggttttgtatgaattgaaaaaagaatggaataagacaaggagaaaagcaggtattaaaggattaagaattgggaggatccaggacatctaactagagagtgcttaaggaggttcagcatagccctgccagcaaagattatttatttactttaagagggagttaagaatggtggtttggggatagcaccaggagatatcagctgtgatggcttggagaaacagtgtaaaccggcagtgtaaacaagagcagggcatttatgagtagttgagaacggtgaataggagtatgactagacagaagatagtagggatgatgagttttttttttttttggtggaagggatgcagtccaagttggtctggtgtctggaatgagactggggcctaataaaaaggagcgtcttatacaggagctcaaatgggctgtaccttgtagcattccgagttcaggcctgaattctgagaagggcaagtggtaaaagtattgtccagtcctttttaagttggtggctgagcttggtgaggtgtgtttttaaaagactattagttcactgaatacgaagagcctgagaaactgcttgggtgatttgactaataaaggccagtccattataagactgtatagaggtgggaagcccaaactgaggaattatgtctgacagaagggaagaaatgaccgtggtggccttcttagaccctgtgggaaaggcctctacctatccagtgaaagtgtctacctagaccaagaggtattttagtttcctgacttggggcatgttgagtaaagccaatttgccagtcctgggcaggggcaaatccccgagcttgatgtgtagggaggggagggggcctgaataatccctgaggagtagtagaatagcagatggaacactgagaagttatttccttgaggatggatttccacgatggaaagtaaatgagaggttctaagaggcgggctagtggcttgtactatagcatagcctgcctttgctggtgtgtggtaattaggcttggtggaactgccatcaataaaccaagtgtgatcagggtgaggaacaggaaagaaggaaatatggagaaatgggggtgaatgtcaggtggatcagagagataagtcatgggggtcaggtgtggtatcaggaataatgtgggaggccggattgaagtccgggccaggaacagtggtaattgcgggagactcaacaaaaagtgagtacagctgaaggagccagggagcagaaagtatatgtgtcaggtgtgaggaagaaaataggttttggaagttatgagaactatagagagtgagttaagcatagtttatggttttaagggcctctaaaagtattagggcggcagcggctgctgcacgcagacttgagggctaggcaaaactgtaaggtcaagttgtttggataaaaaggctacagggcacagtcccagttcttgggtaagaattctgactgcacagccctgcacttcagctgtgggtaatgaaaagggttgggatgagtcagggagagctaaggttggggcagtctctaaagctgtcttcaaggaatggaaagaggagtggggaaaggatttaggatctatggggtcagctaggtttccttttgtgagcttatataatggctttgttaggatggcaaaactaggtgtctaaagtcgaaagtatccaaccatgcctaggaaggaaaggagttgttttgtagaaggtggtggggtttgagagatcagtaggacacgatcggcagggaaaacacgttttatgagaattacgccatgataggtaacagatgaggaagaaatttgggcttgactgaagtaatgggggctgtctgtgaaggcttgcggcagtacagcccaggtaatttgctgagcctgatgggtgtcagggtcagtccaagtgaaagcgaagagaggctgggatgaagggtgcaaaggaatagtaaagaaagcatgtttgagatccagaacagaataatgggttgtggagggaggtattgaggataggagagtatatgggtttggcaccacggggtggataggcaaaacaatttggttgataaggcacagatcctgaactaacctgtaagccttgtctggttttaggacaggtaaaatggtggaattgtaaagagagtttataggctttaaaaggccatgctgggctgggtgcggtggctcacgcctgtaatcccagcactttgggaggccgaggcgggtggatcatgaggtcaggagatcgagaccatcctggctaacaaggtgaaaccccgtctctactaaaaatacaaaaaattagccgggcgcggtggcgggcgcctgtagtcccagctactcgggaggctgaggcaggagaatggcgtgaacccgggaagcggagcttgcagtgagccgagattgcgccactgcagtccgcagtccggcctgggcgacagagcgagactccgtctcaaaaaaaaaaaaaaaaaaaaaaaaaaaaaaggccatgctgtaacaggtgagtgataacaggctttaatccttttaaagcgtgctgtgggatgggatattggcattgagtggggtaagggtgattaggttttaatgggatggtaaagggtgcatgatcagtcgccaaggagggagtagaggtgtcttatatttgtgggttaaggtggggggggatacaagaggaggatgcgaaggaggctttgaactggggtaaagggcagcagtgaggtgtggctgtaatctaggaacagtgagggaagcagataattcaattaaaatgtctcggcctaataagggaactgggcaggtggggataactaaaaaggagtgcataaaagaatgttgtctaagatggcaccagagttggggagttttaagaggtttagaagcctggccgtcaatacccacaacagttatggaggcaagggaaacaggtccttgaaaagaaggtaatgtggagtgggtagcctccgtattgactaagaaggggacggacttaccttccactgtgagagttacccagagcgtctgcgatggtcctgtaggcttccgaggcaatcgggcagtatcagtcttcagctgcttatccaagaagatctgggaaggagtcagtcagagagccttgggccagagttccaggggctctggaagtggcttccaggtgagttgaacagtccgattttcagtggggtcccacacagatggggcatggcttaggaggaatcccgggctgtgggcattccttggcccagtggccagatttccagcacttgtagtaagctcctgggggaggaggttctggaggaacccctgacagctgcggttcaggcatttggagttcttgtgtgctggagatatggctggggtttgtctcacagtggaggcaaggaattgcaactcagaaatacattgctacttggctgcctctactctattatagtacaccttgaaggcaaggttaattaagtcctgttgtggggtttgagggccggaatttaatttttgtagttttatttaatgtcaggagcggattgggtaataaaatgtatattgagaataagacggccttttgaccttttagggtctagggctgtaaagcatctcagggttgctgctgaacgaaccatgaactgggctgggtttttcatatttgatgaaaaagagcctaaatgctaactgattttgggagaggtcagataaagaaaaaggagcattaaccttgactatgcctttagctccagccacctttttaagaggaaattgctgggcaggtgggggagggatagtcgaggaattaaactgtaagccagacctggtgtgatgagggaggtgataaaaggattatagggtgggggagcagaggctgaggaagaattgggacctggctgggcctggcaaggagcagcctggggaggaggggagaagtcagatgggtctgtagaaaaggaagattagaaagactcagtgatgcttggggttgggactgagagaacaggagggagggaaagaaggaggatttgggatgagtcgcattgggaacagagactagggaggaaacaatgtgtaaaagaatgtctggacgtcaggcatctcagacggtttgtctattttacgataagaattatctagatcttgtaggatggaaaaatcgaaaatgctgttttctggctatttggaaccactgtcaagtttgtaatggggtcaagtggcattgcagaagaaaataaggcatttaggtttaggtcaggtgtgagttgaagaggttttaagttcttgagaacacaggataagggagaaggaggaatggagggtggaaggctgcccatagtgaaggaggcgagccaagagaaaagagagagtagagacacggagagaaggggtcagcgggttcttgccccctagaaaagcggagaaggggtagagacacggagagaaggggtctgggcgttcttgccccccagaaaagcggtacttgccactaagggtgaaggagaaggggttgggggggttcttgccccccagaaaagtggagaaggggtagagacatggagagaaggggtcaggggggtccttgccccccagaaaagcagtacttgctgctaagggtgaaggaccaaggcaggcatccccacgtggtcagacacctctgaaatgtgggtgaataatcaggcagacatccccgcatgattaaacaccaagggaagactgtcttcctgagtccgtgactggcgccagagttttgggtccatggataaaacgcatcttctgcatcaccagaaaaggaaaggaactgaaattaagagaagagagagattgaagtgtggcaccaagattgaaaggagaaagaggttgagggatagtgagagaggttggagaagagagtaaaaagaggctgcttaccggatttaaaattggtgagatgttccttggtctgaggaccagaagtcataggtggatctttctcacggaacaaagagcaggaggacaggggattgatctcccaagggaggttccctgatctgagtcatggcagcaaaatttcacttgcgtctgtgtgaagagaccaccaaacaggttttgtatgagcaacaaggctgtttatttcacctgggtgcaggtgggctgagtccgaaaagagagtcagtgaagggagatagtagtggggccatcttataagatttggggaggtaaaggaaaaaggggggttgttctctggcgggcaggagtggggggtcacagcgtgctcagtgggggagctttttgagccaggatgagccaggagaaggaatttcaccaggtaatgtcatcagttaggcaaggaccagccattttcacttcttttgtggtggaatgtcatcagttaaggcaggaacaggccatttaaatatcacttcttttgtgattcttcagttacttcaggccatctggatgtatacgtgcaggtcacaggggatatgatggcttagcttgggctcagaggcctgacagtttctaaaatagtgatgttatctattggagtatttggaagagttgcaaatcttgtgacctcttgaacaatggctagtaatcatttaaatatgctaaacatcttagaattttggcacctcttataatcctagccttgtggcctttcattagttttacaaaggtagtttaattttgggaagggctattatcatccttgtttaaggttagactataaactaaattcctcccatagttagcttggcttacacctaggaatgagcaaagccagccagcctgtgaggctaggaacaagatggagtaagccatgttagatttttctcactgtcagaatctttgcaaggatggtttcacagcaataatggaggaagcgaagatggtgagtgtgatgatagccacagagaccattgcattaagggttgaataggtgtcagactccagaccagggatctataagaactatttcaataaatctcaccttaatcttctgagggtgaaattcttaccatgcccattttacagatggagaaactggatacctatgcggggtgtgtcattctaaattgtgactgaaagaaaaggtccttgaaggggtctggtccaagtatacatcccgtgactattactgatggcatatggcttgggctttagaattgaagaaaagagtcttgaggaaaggagctgaggaaagctgaagagaagttagggaagaagtggcctccatatttgactattgagtcaaacatttattgatcactgtctctgcactaagacggaggtaaacaattaaatgaaaagagtcaaactctgtaaaatacttgaagagattaattctgagccaaatttcagtgaccatggcctggggcacagtcttaagaggtcgtaagtacatgtgcccaagatggtcaggctacagcttggttttatatgttttagggagaggtaagacatcaatcaatacatataagatgtacattggtttggtctggaaaggttagacaagtaggagtgggggcttccaggtcatagatggattcaaagattttctgactggcaattggttgaaagagttaacttattaacttatctaaagacctggaatcaacagaagggagtgtctgggttaagataagtggttgtggagtccaaggttcttattatgcagatgaagcctccaggtagcaggcttcagagagaatagactgtaaatgtttcttagcagatctaaaaaggttccagactcttagttagcactctcctagctcagggtaaagatccagaaaaggaagggaattttctacagaatgtagattttccccacaagagacagctttgcagggccgtttaatatattttggggtaaaatacttcagtttctttcagggccggctatctgtcatgtggtgctgtactagagtcaggttggaatttggtgtcttattgctacagagtctattttgtcagtcttaatgtctctgttttaatgttaatgctggttacttatttctgaattccaaagggaggagggtataatgaggcatctctgacactccccgtcatggcctgaactagttttacagtttaactttgtaacgcccttgcctaagaggaggggtcaattcagttggtttgggggacttaaaattttatttttggtttacatgataatgactaaagtcatttttgcctttttcctctctccctctcatttctccagtgcatgtttaactacttccagctgtgatttctggaaagcaacaaaaactcaactcaataacttggcactctggatttatgactacattagcagatgaagagtctttgccctccactacatctcaccaagactcttcttattatagtagaatctgccttttgaggcatttctgatactttgctatctctatatcctttgcccccctttgctcattgagacactatgtaggcttataaattaagtgtaagaacaacatcctttctgagaaaatgggagagtgtgtgtgtgtttgtatataaggaaatagaggcacttaaatcagaatctccaaaaagatatgtccattcattcattcactcaaccattaattgtgtgttgagtgccaactacctaccagccacttttctagacaccaataatttagaagtgaacaaaacagataattcccctcaggaagcatgtattctggtggggagagggcagaaaataaacctgtaaatatataatatgcctgatatcaagtattacaaagaaaaaggcatttaggcaaggggctagggtgtgctattttatatagactggagagggaaggccttggtgagaagttaacatttgaatagtaacaagggagagtgagccatgggaatatcagaacattccgataattccaataacattttagatatttccgatatttttgataattcttattcatgatattcacgggaatatcaaaagaaccttccagagggaagagcttatgccctgaggcctgtttgagaactaacaggcaggccaatatgtttgtagcatatgtgtgaacaggtgagctttagaaaatgatattagagaggtattggaggttgggtagcaaatcatgagggaccttttgtagcccaatgtaaggactttgacttctattctgagtgagatgggaaactattgttggatttagaaaagaggacctctggtgtgtctgatataaagatacaattctgactactttgttacaggatggaagggtctagtctggtatttttgtaaaccacttgcaggagaaagatggactaaatagcttattgaagttaaagtgtttattcatatgggatgctttaattattttgacattattgagaaaattctacgtaaaatataaacattctaaagccttttaaagaaagatattataaaaatgaaaatatctttttaatttttaaattatttaatctcacaatgcaaaataattctattataaacgaatattcttgtgttactgaaaatttggacatcagagcaaaatggtatatgtatcagttaaggttatctggttgccaataagagaacccaacttttcttttaaaaatggaatgtattgggaaggtattgggtaacctactaatcagtggaaagcagtctgaaaaatcagggacagaaatacgtaggaatcaaagcatttgatgcaagtggcgggtggtggggcaggcagggagatgggcaggtgggcatctcagaagcaggtgttcttcccaggctccttagaatgccaccactggaactgagatctaaatatttcctacctcttttcccttttgctccatatttctcttaaagcccgagtatgtgactctggccatggtaggataagatgtcttgcttgacagttccactcagctctagtcaatggggcagagcaatacctcaaggaaattagggtctgttaacaaaagaaagtataatggatgctggtcagctaaaatgctacaaatgccacagtgttagccctagttacatttccttttactataattcttacaattttggcacatcttcttctagccctatttcttgtatatgtcccagtttttttttttcttaattttatctattgttaaatggtaaagttagtggtcttctcatacattatttaaccattcctaaattgctggacatttagattattgtcatgaaaatgtaataaagcagcagagaatagtaatagctaacctaaactggctaaataatagtgcttccactcctgaatgtctggtctaccctactgtgcttctacaagagagagcatgataaaataagtctacattccagcagaagtatttaaatgaaggggatttcatcaggcattgaaactgacaaaacggtaagccttatcctcccagggactgacaattttccctttgtccattagggggcaagctgattttcatggccccaggacccatcgagctcagggcacacgccatccttgtttctgatggtggagagctccggattggatccgaagacaagcccttccaaggcagagctcagatcacactctacgggagttcctactcaactcccttctttccctatggagtcaagttcctggctgtgaggaatggaactctttctctgcacggtgagtgaggcaattgatcagaggaaatgaagtagagctgtgtctagcagtggaaactgataaaactgtttaaaagtccttgactatagttgctgagccaaccaggtcagttagagcatggcactatttccttaaataacaagtaaaactgttacgattcatgtggcagagtacactaccgttcccaattgtttgctcctctttctgtaagaggattgtgtatacttccacccactgttaggtgactttcagtgcctccttgtgggtggaccatacttcccggcccctttgcaagagcagacttagccttatactcgctttggtcagtggaatgtgagcagaactgggggactgcatggccaagtgaaggttttaagacctgttacgatgctttagccatttcgttttcttcctgccacttgagaatagcctgtcccagatagaggcagttccttctgcttagaacctgaacgaagacgacatggggcagtgctgcagctgacctactgctctcatgtatgtgagtgagaaataagcctttgtcataagccactgaaatttgcatttgtaattgcagcatagcctagtgaaaactgactgatacaattacttagcatgtactgatgtctctcaacatgcagtagcctggtatcccaaatcaaatacagacaacctcatttagttgttgaacctcttcctgtctccccaaaccctctaccccatgagcagggtttaattacagttctacttagaatcctcttacagataggtggggtgtttaaggattcccaggagaaaatagattaggctacagtgtgttctactccaactttatttgctttctgatcatctaattccactttgcaaaatggacattttttttccctcttgagagtcaggaaattaccaggtgtgccaggataatccttagtatcaactgtaaaatatcagtataaaataatgagtaagcatatttcagtgggtgtttatatgcttttggttgcatagcatgagccaaaggcagataaaaaatgtgggctccagatagtgactcaatctccagaaatcataatgtcagttacacaatgatatttctatattggcatcacaaaataatccacttgtcataggataattgctctagatgagggcatggagctgtgctgaggaatctgccatttttctttatccagactctgtctcataccgaccacaggccccaatcattgtctatcaaaaaacatgcttgtgtctcttttggcttactatgaaaggaagcaagatcttttcctcaagcatttaagtgttgactgtgggctacccagtgtgctagacactggggatcaaattttgtgaggttaaaaataccccataactcactggatagaaattcaaaatgcttgctatgttgattctatgatcaacttccaaggggacctttttacctcctatcttcatcagcaagcaactacattgattttgtagcccaggatctattcccacgtcagccatggttttcaaatgtttgctctagctcaatggcctcttaagccactaacccaatatgttgctttttaccagtaaaaaagtgcatctggggaataagttggtgtatatttgtggttcagccagcccatagatcgtccagaggaccccaggcttaggaggaatcctcagatttgagagccactgtcctgtatgatgcagatagcacagctcttcctgaaaataggaattcaaatgaggaaaaatgaaaactctcctaattattttcttctgcctctttcattccaagctcatctaattatcatgctctattgtgaagaatcaaagaaagaactcataaatataccttttgtgcctgtattttaaatgtacgttgtgcatgtaagcctttgtggttaagcaaatgtcaagaaaatccctagtcccattgcttacagtcaatatggggcaattcaagcaaagtatatgcctctaatatggtttgaaaattctgaaagttcagaaaaaatgttgctacttcagccatctgatgttactggatattgagaatgagacctcctctccctctgctttcctcatttccatctcctccttcctctttctcctctctccctctcctttattctccttctccctcctctctctccatgcttcctcccttcctcttctccctctttcttctttattctccttctccctcctctctctctctcccctttttcctcccttcctctcctccctccctctcctttattctccttctccctcctctctctctctcccccttttcctatattcccagattaggccattttcaaaactggttaaacattccccaaagcatttaggacagagaattgactaggatctcacctgaatcacagagcttgcccattgaacacaggcaaagatcaagccatttcctctctgatgtgatgctgcagcatctcatgcatttgaaacaaatattatgtagaaaagagctcagccatttgggtgacagggattcctttcctgatgtatctgtcagagaatcgcagccccacgtgcagctcatcaattctctcctgtcacttctccctcaccacctgaggtctcagacagatttcccctccagcgtggtggtatatcatggctaaagtcatttcataatttcactggccttttgccggggccagaggtgggtctggtgacactggggctttaggaaaaagctaattttctttcaccatcaagtatgcaaaatagtgagcaacttgattcactgttttgcacccaggaagtccctaatgacccagcattcactcagtttcccaggataacataatgaggagattcaccaactttggcgcacagaagagccttttgggagaggtttttgtaaatctagatttctgggcctggaaatgtacatgtgatgtgactcaggtggcctattgactatactcagagaaacactggttcaagtggttaatcaaattggaatcagaaatgggcccagttctgccacagatcagctatgaccttcaacagatctctaaaaaatcagaaaaacacagttcccacttcataaacttattgctcatgaagtgttccagagtgttgggcacacaaaacacatattaattttcttgtctatctcttttcatcagagtaacagaagggttttaaccttggagatcatgtggtaacaacattcccaggcatcttctcttctcttcccaccacccagtcaacacctttagattttaatctctcttggtgcagctgcttcccagctgtggataaccaccattcctgggcgtggttacaaaaggcttcttagaaactatttgcatgggtcccagtatagtctgaagcagggcactgcccagcgaatgaggcccttggcagacatttggttcctaatattcagcagcaatgctgaatggattctaatttaactccagctcaggtcatgtagaatcacacaaatggtctgcatgtcagtccgatcactttcccaccttctccttccatctcattctttattattgctctttgaaacccttctgctccagctgatttttaccttggattaaaatcgctaagcaaacaggctttggtgttcagctgtcacaaggcaagatggagttgaaagcacgttacatgtatttctttgaatgtaggaaaagtcccacacccttatacactcacatatacacacagctgcacatatacacccacacacagcaccatcttttctgtttctgtttgagagtagatgaggacaggttctgagttgctggtggagttcagattgtttagtaacttctgtcagctgctcactttgatgcgttaatatgactaaagggtctcaggattcctcctgagtggcagtctggggtttgggtagctgtagtcaataaggaaatttcactcttgccttttgctttcatcactctgtctgccaatccaggttcaccactccaaactgagtgccaatcacttgtcacttttcaagtgggttgctgtcagcctgggcaacttaaatttttgacaacgtaattacggctcttgcttccacagtgggaatctgagcaggatggtggagcttttattgattgttcagcagggaaatttatcaatgtctctcacttcatttccagtttctccctgagaaatttggctgacagtttcttaggagaaaaacagtctcatggccttggctggacttctgtctttgtccttttcaagaaattacaagatataggcattaaatatacatggaaattcctgagaaaaagcagtatgtggggcatgattgaagaaagcacgagtgcaattgcaaggaacataagaatttggtaggaataaataaaagcagtggtctaaataagcaagcttagatatggtttgttttccttctgaaaatgccaagtgtctgcatgtaaattccatggttgctatgagtactgtgtaatatgcactattttcatagttgctagagtatcaggctgtctttaagcatggtataaagtgtgtggaacaggcacatgtgtgggagtgtgtttccggtcagtggttttcacattgtgctccacaaaatccaaatgtttcctggaggggatttaggggttccctaaacaatgaatattggaggtcaagtaataaaggtttaaattgctcaagtaattgatttattgcttttatctgttatatatttgtgttcaaagtaacagtttgttagaagaaagagttccactgttaaaactgtgattaaaaaactctactaggtcattcttttagctgtggtgtatggatccttttgaggtgtccagggcctctctgcatgattcctgtttccccaagactgatttagctctgggacattttctataaagtctgttctttgatgtagggtgaaactttctagagcccattttcatgtcataacagttcctcttatccaacaatatatttttaaatctccactctctcgtcacctgattaatagtctccaatgctgtctcctcttgcccctttccttacctatttcttctagaccaagactcctcccttttcttctgtctctcgttcccttgagctagatacaaaccagagctatgacatggcatttttatatgtagctttattactctgaaattgtttggttttaggggacagaagcccactggaaacaaacttagaaccaaggatttatgaattcttgtaatcaaaacgcaggatggagagaaagacaatggccttagacgtgactgtcttcaagggtccgaatgtccacaggactcacccctcagtcccttaccctggctgtctctgcatgtattgacttcactctctcctactccttattgctgccttctctatggttattgggacttcctgatttcatgtggactttgattttctactaccaaagaaaggaacactgtattcttttcaaaaaataaccaggggaggcctcccaaagtccgctagagttacttagcagactaaggactatacatggtgcccagggggaaagtgcactctgactgtccaagctcaagccacattttcacttctgctttccccttgcatttatcaccacaaaatattacctgtgatttcatgggaaacttgagctgatgtggtgtgtaaatttgccacaggcctgagcaaatgcaaccgacacaattttagggatgtttggtagatgcaaacctttcagacagaagtctgactcagaatagattttatttttctttagtcactaccttcgtctgtattctgatggatcctttttcttgtcctttaaaaacaccttggttaccaatagctttccagttgatttcagatattgaaaatgccagtcctgattaatctagtttaaaaactcagtctcctattcatttaatgttaccttcctcacccacaaagcttcaacttgaggcacttgggatggtagggtctgctccctcactcttcctctaatccttcttatttcatattgtcagtatggggcaggtggaagaggtaaggtgagaggtttaacaagcttaatacttaacggtgcacctatatcctctgttgggtgttgctctctctctgaataataattgctgactattgagtctccctcctaagatgcctgcatgaaatcactggagtcttgtaggaggcttttccactgcacagtttctcaatgtggaagccccacttgggttttcaatccgttagcatccaccttgggggttggtcttggtggagtactagaaagttggttcaagccaagctatcttccctacaattcagctatccagaggaaacttacaaatccacatgaaagatgtttcacttatcacccctttctctgctctgctctttctctaattgtttcccctgcttagataagcatgagcagctgagcaaataggctgcatatgcagacattccacctgggaaaagaagccagtctccccttcttacaggtcactctgtgattgatacttatgcagccctctttctttgcttaataagagagaagtagtttcacacctcgctctataggaaggggaggaaaggccagggttagctcacccaggctgatggctcatccccatctctcaggatttctttgaatctccttgtttttggtcattcataaatgatggagtggactctgctccagggatggcaaaagtggcagagttagattagctttctttaataagccccaaggagatgttttctccctgtctgtggcttccctataatgtggggtgcttatcatctcctgatcctatgcatgtgtcctcctggtaggttctagaggagcagaagtcccacccaacaacctgctatgtatgtaaaaagggtgccctagagggatgtggggttgaaggggagagccactgtcattttgcggttgttatttggctttgttttgttggtttttatttaggactgggaaggaaggaggattaaatagaggggaagaatggagaaaggaggatgaggaaaattaaaaaagtatttattcctttttctactcttaaatttaaatgagctttaattcagtgttggggttctggtcagctggcatgttgtggcagatcgtaattacacagttgagttaacatcagcaagcatggtcctggcatacttggaaccctagcgtggtaggacagccagtgactgatgagtgtttctctcttttgagcagatggagactgacccttggctctatgtcctctaaaatataaccaacaccaccaacaaaaaataaggttttttttctgttctgtctaacaatacttcaaaaaagtctaaacactgtataaccattctatttacagtggcagatatgtgtctgctaaaatctcattgatctggacaagagtaaccttggaacaatctttaagaaagggttccttaaattaatagtataaaccacactttaggggacttgtttaaacacatttaagtgaacatgctgtttttaaggtcttttaatttcaggtgtttgcatgtaaatgtatactgctaattagaaatgagttctagctattcaataatccaagtacagcaggaaccccacttagaaacacattgtaaggtacttcaagtttctatatatacttgaaagtgtcggcattagtcaggtctttttttggtttcaagtgacagaaaacccaattcgaacaaaaaataagagcacttattgcctcatataactgaaaataaaaaacttgaggcgaaaagaaaaaacttgaggcacagctgagtccaggtgctccaatgaagtcattaagattttgtttctctgcgactcttggttctgctttcccctcagctggcttcattttcagtcaaactctgccctcatggaggcagaaatggcagtcctgtgactccagatgaaagggaatgcctctttcccaatggctgtttaacttctgagcaaatttcaacatttccccatcaccgtttgacattgctccttcggttttcttctccttagctttcaacattatttaatgtattatgtaaggtttacttttcacatttttttgtatttattttattacctctcccagaagaatatatacatcatgagggcaagcactttactttttttttttttttaatctgcattgcctagaacagtgcctggactcataatatgctttaaaaaatatttgcttgaataagtgaatgaaaaacttgagcaaaagcctcaggattaactttcgccccatttgagtcataagccatttgagagagagagagagataaaaagagagagagagataaaaagagagagaggaagggagagagaaggagggagagaaaaagagaagcagatagagagtccaagtccaaaggcgtaagaaccaggaagaccaatggtgtaagttccagtcagaaggccagcaagctggatatccaagaagaacctatgcttcagtctaagtttgaagaccagataagaccaatgtctcagttcaagttacttcatactcagcctttttgttctattcaggccttcagctgattggataaggctcatctacattaaggaaggcaatcttctttacttagtctactgattcagatgttaattacgttagaaatacctacacacacacacacacacacacacatacacacacacacacacgaagaacaatttacatttagctaaagttgtgggtaccccatagcccagtcaagttgatgcgcaaaattaaccatcacagtcaccaaagcaaacctcataactgactctgtatcgtattttagacacacgaggatttcaagcctctcatcttgacacaaagcttctcaaaggaaagtaactagctccaaggttcatctcttcctttcaaactttctgtagtttccattttcctgctaggttgtgaggatctttgctggcgttctgcatcttctctagatgagcttgactttgctccgtcatagagtactcactcactcatcttcctctgagtaagtatgaggagcctgggctcttgaagtggactgcgtggtccaaatcccatctctaccgtgaactagctagtggaccttaaaaaactccccagtgtttcagttcccacatctataaaacggacattattttaagacatttctcatgatatttgttatgtggtttaaatgaaacaaaacatgtaatgtacttaccacaatggcagatgttgagcaagtactcaataaatgtcagttattatcattgttattatttgtttacacttttgatttggtgaagttgtcccattattagtctaaagatgggatggtgtttaccgttttccaataatctctcagctagaaacctggttgtcattcttgatacctcctttatcattcctcttatcatgtccatcactaagtcttgttgattttaattcttagataacttgtgagcccatatccttctctctatctccattactgtcaccttagtttatggtaccttcaacttatgcctggattattgtgtaagcttttaaacttactttctagttgccacttctgttctttccaattcattctttgccctggagccaagttgatcttttaaaaacacaaatctgtttatattgtgctgctgctcaaaactcttcagtggctttccgttgtttctaaggtaaagtccgaaatttatagcatggctattaggtgctatttagcttcctgctaacaccttctgtcctgtttttcaactctcccccttggccaccctcatgcttcagtagtagtcttcttttaggttactaaatggttaatgtggtgtagattttcattttttacatttttgagtaccacaagaaactcaactttgttaagtaaatggaaagctacataggcagaagcttgtgatttttccttcaaagagaattcttccatatgcatcatcaaagcaatactattaatagtattgctttcagcctggtcatggaaaaagagtatcattgaattgggtattatatttggtatttgtcaaaattggattttacctagatcctggcactttataattttcaaagctgcttcccattctttactctcatttaactctcacaaccaccctgtgaagcctgaaagactgggatcgttactttcattttagagatgatgaaactggggcctgcaaggggatgtaactaaaactcattccattttcttcattggacttaagacacacatggcctcgcttctattttgtgtacacatagctggtatttacttgtggcagaaaggcagaatatacttctttctgaaacagtctcctcaattttaactttttcagcttattttgagatcccaattggggctttctggcttatagctctctttgtaaaattcttgatagaggtacaaagaaccggtttctttcacacgttatttatcttttagtacttctatggagttttccaatctttgtgatggcaaatctacaaatattttctcttatggtttctgcctttgattttatgtttatcaactcttttctgtacaaagactatataaaaatttacctacttgttttttggtacttttattgttttttttttttcttttttttcacatttgtgtctgtctttaactagggtcagcaaactatgagccatggaccaaatctggtccattccttgcttttatacacaaaattttattgaggcacagccacacccatttgtgtaggtattatctatggctgctttgcactataagggcaaagttcagtcattatgacagagaccacgtggtctgcaaaccccaaactctttattatctccctgttctttttacagaaaaagttaccaggcccttattttaatcagtctagaattgattctgatatagtttgtcagttatctattttttttcaaatgaatagccaattttcacagcactatttattcaaccataggctaaaaaatgacacccatgtatgtccatgtcctaatccttggaacccatgaacgttaccttaaaaatttggcaaaacggggttgggttccaagatggctgaataggaacaactccagtctatagctcccagcatgagcaacgcagaagatgggtgatttctgcatttccaactgaggtactgggttcatctcaatgggacttgttggacagtggatgcagcccatggagtgtgagccgaagcagggtggggcattgcctcaccagggaagtgcagggggttgtggaattccctttcctagccaagggaagccatgacagatggtacctggaaaatcgggacactcccaccctagtgctgcacttttccaatggtcttagaaaatggcacaccaggagattatatcccgtgcctggctcggagggtcccatgcccatggatccttgctcactgctagcacagctgtctgagatcaaacgcaaggaggcagcgaggcttggggaggggcatccgccattgctgaggcttgagtaggtaaacaaagtggccaggaaactcgaactgagtggagcccaccgcagctcagctaggcctgcctgcctctgtagactctacctctcggggcagggcatagctgaacaaaaggcagcagaaacttctgcagacttaaatgtccctgtctgacagctttgaagagagtagtggttctcccagcacagagtttgaaatctgagaatggacagactcaagtgggtccctgaccctgagtagcctaaatgggagacacctcccagtaggggctggctgacacctcatacagctgggtgcccctctgagatgaagcttccagaagaaggatcaggcagcaacatttgctgttctgcaatatttgctgttcttcagcctctgctggtgatacccaggcaaacagggtctggagtggacctccagcaaactccaatagacctgcagctgagggtcctgactgatagaaggaaaactaacagaaaggaacagcatcaacatcaacaaaaaagacatccacaccaaaaccccatctgttggtcaccatcatcaaagaccaaaggtagataaaaccacaaagatggggagaaaccagagcagaaaagctgaaaattctaaaaatcagagtgcctcttctcctccaaaagatcgcagctccttgccagcaatagaacaaagctggatggagaatgactttgatgagttgacagaagtaggcttcagaagatcggtaataacaaacctctccaagctaaaggaggatgttcgaatccctcacaaagaagctacaaaccttgaaaaaagattagatgaatggctaactagaataaacagcatagagaagaccttagatgacctgatggagctgaaaaccatggcatgagaactatgtgatgcatgcacaagcttcagtagccgatttaatcaagtggaagaaagggtatcagtgattgaagatgaaacgaatgatatgaagtgagaagagaagtttagagaaaaaagagttaaaagaaatgaacaaagcctccaagaaatatgggactatgtgaaaagaccaaatctacgtctgattggtgtacctgaaagtgacggggagaagggaaccaagttggaaaacactcttcaggatattatccaggagaatttccccaacctagcaaggcaggccaacattcaaattcaggaaatacagagaatgccacaaagatactccttgagaagagcaaccccaagacacataattgtcagattcaccaaagttgaaatgaaggaaaaaatgttaagggcagccagagagaaaggtctggttacccacaaagggaagcccatcagactaacaacagatctttatagcactaaattataatttatcgcactaattgcccacaagagaaagcaggaaagacctaaaatcgatactctaacatcacaattaaaagaactagagaagcaacagcaaacacattcaaaagctagcagaaggcaagaaatcactaagatcagaggaaaactgaaggagatagagacacaaaaaacccttcaaaaaatcaatgaatccaggagctggttttttgaaaagattaacaaaattgatagaccactagcaagactaatagagaagaaaagagagaagaatcaaatagacacaataaaaaatgataaaggggataccaccacctatcccacagaaatataaacaaccatcagagaatactataaacacctctacacaaataaaatggaaaatatagaagaaatggataaattcctggacacatacaccctcccaagactaaaccaggaagaagttgaatccctgaatagaccaataacaggatctgaaattgaggcaataattaatagcttaccaaccaaaaaaagtccaggaccagacggattcacagccgaattctaccagaggtacaaagagcagctgataccattccttctgaaactattccaatcaatagaaaaagagggaatcctccctaactcattttatccagcatcattctgataccaaagcctggcagagacacaaccaaaaaagagaattttagaccaatatccctgataaacattgatgcaaaaatcctcaataaaatactggcaaaccaaatccagcagcacatcaaaaagcttatccaccaagatcaagtgggcttcatacctgggatgcaaggctggttcaatatacgcaaatcaataaatgtaatccagcatataaaccgaaccaaagacaaaaaccacatgattatctcaatagatgcagaaaaggccttcgacaaaattcaacagcccttcatctaaaaactctgaataaactaggtattgacgggatgtatgtcaaactcataagagctatctatgacaaacccacagccaatatcatactgaatgggcagaaaccagaagcattccctttgaaaactggcacaagacagggatgccctctctcaccacgcctattcaacatagtgttggaagttctggcctgggccatcaggcaggataaagaaataaagggtattcaattaggaaaagaggaagtcaaattgtccctgtttgcaaattacatgattgtatatttagaaaacccaatcctctcagcccagaatctccttaagctgataagcaacttcagcaaaatctcaggatacaaaatcagtgtgcaaaatcacaagcattcttatacaccaataacagacaaagaaccaaatcatgagtgaactcccattcacaattgcttcaaagagaataaaatacctaggaatccaacttacaagggatgtgaaggacctcttcaaggagaactacaaaccccactgctcaaggaaatcaaagaggacacaaacaaatggaagaacattccatgctcatggataggaagaatcaatatcgtgaaaatggccatactgcccaaggtaagttatagattcaatgccatccccatcaagctaccaaggactttcttcacagaattggaaaaaacttctttaaagttcacgtggaaccaaaaaagagcctgcatttccaagacaatcctaagccaaaagaacaaagctggaggcatcatgctacctgacttcaaacgatattacaaggcaacagtaaccaaaacagcatggtacttgtaccaaaacagagatatagaccaatggaacagaacagagccctcagaaataataccacacatctacaaccatctgatctttgacaaacctgacagaaacaagcaatggggaaaggattccctatttaataaatggtgctgggaaaactggctagccatatgtagaaagctgaaattggatcccttccttacaccttatacaaaaattaattcaagtttgattaaagtcttaaatgttagacctaaaaccataaaaaccctagaaaaaaacctaggcaataccattcaggacgtaggcatgggcaaggacttcatgactaaaacatcaaaagcaatggcaacagaagccaaaattgacaaatgggatctaattaaactaaagagcttctgtatagcaaaagaaactatcatgagagtgaacaggcaacctacagaatgggagaaaatatttgcaatctatccatctgacaaagggctaatttccagagtctacaaggaacttagacaaatttacaagaaaaaacaaccccatcaaaaagtgggcgaaggatatgaatagacacttctcaaaggaagatatttatgcgatcaacaaacatatgaataaaagctcatcattactggtcaatataccatctcacaccagtgagaatggtgatcattaaaaagtcaggaaataacagatgctggagtggatgtgtagaaatagaaacacttttacactggaagatagtgtggtgattcctcaaggatcaggaaccagaaataccatttgacccagcaatcccattactgggtatatacccaaaggattataaatcattcaaccataaagacacatgcacacgtatgtttattgaatcactgttcacaatagcaaagacttggaaccaacccaaatgcccatcaatgatagactggataaagaaaatgcggcacatctatactgtggaatactatgcagccataaaaaaggatgagttcatgtcctttgcagggacatggatgaagctggaaaccatcattctcagcaaactaacacaagacagaaaatcaaacacatgttctcactcataagcaggagttgaacaatgacaacacatggacacagggagggcaacatcacacaccagggcctgttagtgggtggggggcaaggggaaagagagcattaggagaaatacctaatgtagatgatgggttgatgggtgcagcaaaccaccatggcacgtgtatacctatgtaacaaacctgcacgttctgcgcatgtatcccagaacttaaaaataaatatataaaaataaataatgaatatatatatgtatatatttgtttttataactatttcaaatacaacttaaggtctttaaaacaggtcaacaaagtcctgcattattttgcccagtcctcttcatttgctccaaaggtctgatatctagttcatagagtaacacatcaggctctcagtttccctactggctggctcttgtttgtcttaggatttgactcattttccccaacatacagtaagtccattttctcactaaggattttcttctcttagtttgatatgtgtactatgggcttaaaacagtttcacaacagtatcatttcttagatttcatcccaaatattcatttagtggtttccaaataatttttaggataaactctaagtgctatgggagggcctgtgagtcatttttggatgggtcctgctcacctcttcagaatgaagggacagtcactaggtgcctataccttctgtatacctgtactctggccatgccacatatgtagcagttattcgaatgtcccccaccatcttacacatcattgtcgttgcctagggtacgcttcccattttgtcatctggcacactttggtttgtccttcaagacccagctcagttatcacctcttctgggaagcattcctggaaaggaccactcccttggtgtgattgcagtgctccatgtctgtacacccctgagtgtcactgcaccttgcacagtgcacttctgatttttgtctatttcttgtactgatcatgggccctggaggaaagggactctgttctttgtgtttgtcttcctagtgcgtgacaaatgttcatccacatacaagacagcatctaatgttttgctatggataatggtgatgttgcatccagaaataagggggaaataatttgtatatatttgaggacaatatttctagttttttttgtaagttcctttattctgatgcaaacattattttaataaattatccttttctttctcctttctctctctctctctctctctcccccccacctctccctctctccctctctccctcccccaccctaaatgattttgaaaggccttggcagttattcttagaataaagatttaagtcctacaaagtaagcaaacagaggacaattagtgattttagtgtgttaacccacaaggattattttatttttctccatgcccatttagtaagaatggtgctctgagactgtgtaattatggatgaatgacattgaaatgcttgaacaataatttgtaggaaatacaattatgagtagaagtcattagtgggagtaaatgagtagtttgttggttaacaggtcaacatggaaagcccaaagtgattaaacatagtattaaattacaagttaaaagcatagtcctttttcatttagcatattcataaattattgagctttttatgcgtagttttatgtgtttttgatttgtggtacagaaaggaagggagctacccaacctgggtttcaatagttctatgaacagaaatgactcagatgtaaaatgtgtgcaatgccttcttcatcagagaagtcagttggtccaccttgtatgacatttaaataacatttatgaagtaatgagtataattttttgaacatcaaagctaattgggtacagttaatttacagctatttccagaggctacaaattccatttacttgtctagttctctggtcttagattcagaagaactagtttcagaactttgtgctgatatctattaccatataatcttgtccttgaagaatcatagtttcctatctgtacaatctgttaaaataaataacaaaaataaaaaaccaaagatttcttacttgacaatgaaactagtttgcataggttggggttattctaagttttcaataaatgtttgtatttttttctgctttttgcatattgaatattatatactcacttgggtatatatctgatgggagtttacaagtgattgcccagaaggcaatacttaaaataggtcatttaaaccactatgaattgaatgttaattatgcgtccagtgctgtgttaggaattgtgccatatataaaggagacatgaggcagtggcacagcagtcatggtgccacctgtaaggtggagagaaaagacacatgcactttagtaatttcaggatgatttagtgctgagatacatgggactgactattgtttatgtaattgaagtctccccaggcttccctgagcctgctcagcctgtggatatttcaatagtgataaaaattttactgtctgaggcccccaactctcacaaaaccttctcccctttttagcagttctgcttgcttgttctacgtgttctcacaatgtgttttctgtgagttcatctgtctgccttagtcaccatgaggcatctttcatgttcttttcctcctactttggcttcttggtcattgttctccatttaggaaggtagtaggggctgcctcatccctgcatctactgctggtacctgccatgagagtactgaacacatgggtttgagggtgtgggctttcatttaaaaccccaagatgtgggagtgtactgtgtcccatgatgaaatgtggcaactgtctctgcatgccactcagagtcccatctgatcaactggacaccaagacattggggtgcttgtttctctgtctcatttgtgattttatgcattcaggatgtatttatggaacacttacatgctagacactgtgaaaggcattgatattgtgacggtgaatgaacataggtatggtttttgctgttatgtttagtgggggagacaaattctaagtacagaaatagaggccaaattgcagttgtgttaagtgtgagaaaggagacagccatggtgatatgacagattatatacagggtttgcctactcagcaagtcttggagccttctctcaggattaagttctaaagaatgcagcagagtgagttggtgagagaatctcaggtggagcagcatcaggtgacaaagccatctggagggttcctccaaattattccctcaggttcagtcataggtccttgtggtcaagagagagggcctatatctgagattgaccccatatcttctctgtcatcttcttttctctcatctgtttctttgtgcaaacttcctcccccacacaaagcagctcaaataaatggcccacaagctacccagacatacttgggaatgcctaaatcccagatgtacacacagattttgctgaaggaacgatgtcactgatcactacaaggtttgtaggaggaagtgaagatgaagtatgttctgaaattcactgaaaagattgggcttgagttgtgctttaaaaggatagatgaagagaaagaagcaaggacatgagcggaaaggacgaaattgacaaaagattagaggcaggacgatccggttaaatgagaagaggtaaagagactgggcttcttggaacagaatttattaagaaatcagagaccataaagtagggtcacattatggagagtctttgaagtcaagcagcaaatttgagactttgttactgagtattgcaggaaaatactgcaggttaatggacaaagaagggatgtaattgaaataacttagcacaaaatttgtttaaaaaaagaacataaggaggaatacttaaaggaataaaagctgtttgcaagagggtctagctcagataattattacaataatttcaagatggtagtagctcatctaaatgtcaatatctactatgtagctagaaatatgaggccaacactcattaaacatccaggcttgatgttttaaccatacacatagaggtgttatttttgcaatgggagtgcataagttataagctagttttactgctttctagaggctctgtcaatatttacaaagatgtaacttttttgttaatagtttaaaaatgtacttcaaagattatctgtgaattttttcatccattcagagttgaccattatttataggagtaactagttgagctagacctttgtggtctttactcttggttctgccatgcgtagcttgcatgttgatagtcacatagcaggtatttgttgcatattaattgagaattgtgaatactgatcacagagtctgacggcattttgtcttggataaacatttttctgtgcttagtagagatttttctatgtaggcattcaagaatgggttataaaaattcacatatatatgcatatacatataaataaattttatttcattttattgtttccaagggttaagatatacaaacaagaaataaagttaaaattattttcttttgggatgatttatgtcttaattttcacctgccttataattagaaattttgaactctgtacatttttttaagacaaaattattgcccaagtaaacttcagaaattacaatattaacccagagacctttctaaacctagaacattattggtacaagtgcttatgcacagagagacaaataaataaagaggaaagtttaaaataatttgaaaatgatttattgtcggccacctctgtagttagagattcaagtattattactttactttagtacaacaagggaggacagtaacttgctgcgggctaaaggtaaattatcatccattgcaaaagaggaaggaaatgtactacagaaagaggaaggagtagggagtaagccatgtgttttctgaagtattcagataatgccttgaaaaaatctgtgccttgacccttgctggaaaagaccagaataaactgtgagacagatgaccttcttgaatctttgataattagagattagcatgctggtatggggatggtcaggcgggtatgctggagtgtaatacaaacaaagtttatcttgaaccacaagttccccttcttcaactgcatttagcagtcctatgttagataggtctagtttttagagtttgaagggatcatttaatacaccaagacttatgacaactctaagagataatttttgttttcccctctatttttgttatttgtgaagtcttcatattggaaattagttatggaggtctacatcagaaagtctaataaccacttgttttttcttggaataaaaaagaggtggtaaaatttcatcctcaaacagtgtgacacagaaaaggaagagaaaggactaacatacccttagggtctattatgtggtaagatccaagctagatgtttcatagatactatttcattgaatccttccaaaaccctatgatggaagaccctgctacttctgtttttaactgaggaaactgaagcccattcatcaagtttattaccctaaagaatagggttagaatatgaaaagatcgtgattcaaatataagtgtaatctgaccacaattcttgtgctttttacacgttgctattctctagtctggcttacttttattgacttctttttatagataaaaagaaaaccaaggtcaaacaaaataaaacaaaactaatataaaaaaattagtgcttacctatcctgaagcttgcttttccaggtcttattttatgggattctttggctaaataacatcacatttattaatgattaaattaatcacgttttgattaatgattaaattatctggacaacttttcctcgggctgctttaggttcactaccagaagtaattgtcacctgtcttagagcaactgcccatgccctagacacagtgctggctttagaagatgctgtggactggaaccctggggatgaagttgtcatcatcagtggaacaggtgttaaaggtgccaaaccgatggaagagattgtcactgtggaaactgtgcaggatacagacctctatcttaagtcacctttgaggtactgagtgtcagcttggctaagttgacatggaagaagatgagatcttaactgtattggggtctggacatttgtattggggtctttcaatgatatatttcttctgcttaaataatggtagacattttgacaagaaaattaaaaagcatgaaatgttttgaagatttagactttgtaagttagtttgtcttgtctctagaacttctgtcttacacaaatgtttggggcaatgatcagcatagtttctaattttcatgtacttgtgtctatagttcactatttggtattgagtttctaaagaaacatgaatagatccccaaaggaagaattatgttaatctagtggcttattattcctagtaagatttggagtgatgtcctcagttctatcatcctctttttttctccagatattctcacaactttacagagaattgggtggctggagagcaccatattttaaaggccactgtggctctgctcagcaggagtattaccatacaaggaaatctcactaatgagagggagaagctgcttgtttcatgccaggaggccaatgctccagaaggtagaagagtgttttgttggaaagtctaatgagcaaaaaagaatattcttactgtctgatgatagatggcattgctgtggttgacctcttttaaaatagaataagcccttaaactttggatgcccatacttttctgtagttttcagaatgctcttgattgtcatttcatcctcctctctgccccactgcccaacaaccttgtgaaaaagataacaaaagacaaaagaaataaaatattatttctctggggaaaatatttctattaaagaactaaatctgaagagttgaattacatttctgggttcaatgttaaaattccaggccacttctaagattctcaggaaagccatatgccagagttctgggctcaggcagcacattcttactgattagacttgtagggctcccccatccccattttgggatttgttttctgagtgaactaccacatactttaggtaagtggtggaaaaattcaatttatcttctagtagaatagcaggcactgaatcacattgatgtgcctattaagcatctatttcagggatggttagtttagtaggtcatgttttggtttcccaggctgtagattatgaggctttcacatgttgtgaagacatcatttgtcaactttggtccaggatggcgtgggtgtcaaggatgacttccaggcatgagctctggatggatgatgaggctatttgctgggatgggaagaggagcaggttttggggtgggagagtggcaatcgtgagtttaattttgtatatgtcataactgagatgccagcaggccagccaactgtgtagagatgtctggtaatgtgtggagcctggaagaaaggtcaaagggagctggagttaaagatttgagttgtgtctaaatataggtgcatgtgagtaaaatgttgccatgtggttgggtgtggggagttgttagaagtagagaggcagtttggcctcacctccctccctacaaatcatctactcacaaatgtgtcattctaaaaagaatgtttggataacagtgggttcacttccatcaactgcccaactttatcaattctgcagaattgggatctacattctattcaaacttccttggtattctgagatcatattttgccaaatattgcatttgatcatgctgccagtgagatcatgcttctaggtttaagccattataaatctgttagccccaaatggaaaacatccttgattgcatcacaaatcgtaaatacaactacaatattctcaaaataagtcatttcttttctgtgtggggctggagtgtggaacaaggtagctgaatttaataacacaaggcctgtccatttgaaaatcttatggatcagtggcacaaataatcaaattgtgataaggcatacaaatataaatatctcttcattcacctcttctctgggtaatagcaaatgattggattctgaaatttactgtgatatgatacagtgttttatattattggtgcttctttggatcattaacatgaaaaatctttattatccattggagagatgatttattctccagattagtttgtaccaccaaatgccatgtatcaacagaaggtgccctggatcctgaggtcacaacattttggtagcaatagtagttgtgtgtgttaggtccaggtggtttgctgccctccctggcattcatagttgtgtgtgttagttcaggtggttgctgtcctcactggcatttgtagttgtgtgtgttaggctcaggttgctgctgtcctcattagtggcacagctggggaagtaggtgttggtgcaggagctgctcagttgcttctctggagtcctttgacatttctgtggtagcgttattgctaagtccccaaaccataaaacagcacagtaatggggaaacctcattggacagcttaagattaaaaagtgctgttattatattcagtgctaacatgtctttcctacaattatcaaccacaagaaggtcattttattgcacatttcctccagaggatcttttagattgaaataagcatctatttaggttgggtttgtgggttatagtctgactctttgtgacagtaattaaggtgattgatttgggagtttcttgaaaaaatagaatgaaggcaacatcatgtcctgtttatcagatcttttaattaataatatacagaggagaatcaaagaaaaggggaaataagattattaaatgaaataaacagtaatggtttttcctcggtgctgacagtacctttcaaactgggagatttgtctggaagcatgttctacatgctttaggttctctggactttattttgcatttcaggtaatctgcagcactgtttgtattccatgagtgagaagatgctaggatccagggatatgggagccagagtgatcgttcagtccttcccagaagagcccagccaggtccagttgaagggagtgcagtttcaagtcttggggcaagccttccataagcatctgagctcactcactctggtgggagctatgagaggtaagggggtccggacctaggactttctcatgtttctttctcccatgtttaaggcactacatgcatggtggaatgatagatgatatgtgggatttgagggatttagagatggataattgttatattctaggtctatggttcccaaacttcagtatgcctaaacaaatcacttgtggagcttattaaaattcagagttatagaccttaccccaacaaattctggtctaaggtaggcttaggaatgtgtattttaaatacaaaccttttgattctggaacaggcagtccaaggagtccagtttgagaactatcactataatacagcacacaagagtgaaccacacaatcctgtgttttgaattctgtctctaccacttactagctttgtgactacaggtgaattggcattacattatcaacactgtgggagtccaggcacttctatgtaaagttgtcctaaatcagaggaatcttttgcctggggaaatgagggggaatgggctgaaacccaggtgctttttctggaaatgaggagcagttacatgtgcagatcttggccagacatgaagatataagaagggagcaggaaacatcaaattcaggtgagaacaactaggtgaaaaacaagatcagaatcagaaaaacagaatatgaccaaatgcactgataaaagttctaaaataaaagttgaatgtaggaacatccagggcaaaaactcattaccaaaagctgacatgcagagaatcacagaatgggggtgcagatgccaagtcaggaggacagcagctccatttctgagtaatcctccccattcatcagcactttcaacacccacacattcaagctttgccttctttaaagaggctgtgccccaggggttcagaggttgatgcctgacaaaggacatcagggcatactttgtggttcaggtggcttttgagagatgctaggattctaacaggtaattgcagagtaatccttcaggtcattgagggcaggattctgaactgccagaagcaacattttccttcatttcaaattatctgcatgctaaggacgtctatttcttctaatttttccaatctttttaaatttatttgagtcatttcagaggatggctccgcatatggcctctccgctagtgcttcggattgattagtatctttatttccttctctctggttctttggtcagctgtatatagtactgcagaatatttgacatgcggccaattcagtaaaaaagagggtagctgtcacaaataagttatcaattgaacataatcaaagcccttccttgatcaaattttacctaacctatctctcccacctctgtttcaatcagagtagctgcacactcatctatttttatagatattttatattttaggttttatttgaaaaagagttcagtgcttaaaaaataaaagtttgaaaattactgcattaatacatttattacctttaaatccctgttaaaatgcagaggctagaaacttttggaatgctcattaaggaatcttttattgtttaacaccctgaagcccctcatgtcctacgcagctaattactcccagctaccagagttagaaagcattgggatatttgaacagtactttttaaaaaatttaatttaattttaagttctagggtacatgtgcaggatgtgcaggtttgttacataggtaaatgttgcacagtactttttaaaggttcactaatcccagtattccgcccataagagctacacaaacacataagtacttactggtttttcacatggtcaggcctatgctgtttgggtgatatggtgaagattctgtgcactatgggcagtgtttgctacagaagtagatatggatgggttaatttattggggtggatccttgatgagcaatgtgagggcacctagtagtaggagagctgagattgaggggaatgtggagatccagtgttgatagtgatgttaaagtttagaattttttggatagtcccaactgtaaaagtcaaattattctgtaaactaaagtaacttttctaatatcccagcacttggcatctgtatctttctcactacctagtaataatacaaagctccctttttaggatttatagtttaattattcaaataatggatttttattattttaatgtcagtttcctccatcagaatgcaaatacatgaatgcagaggttacttagtttcattcatctttatgtttccagcacaatgcaatgcacaattcctgaaacatatagttgatactcagtaattgtgtattcattgactcatctaggcctcgtaaccagatctggggatcatagaatatgcctatggaaccagtgtaatgattttcctaattgtcaattttttagcgtagtagaggatagcttcctctttagttgtataaacctatccagttcaaatgtgagagtcatgatcctcaggccaacctttgaccttgcttacagttaggaatgagtctctggctatcttgggccaagaatattattgcctgataaattataaatattaattcactgctccaggtttcaaagatcaaggctggcccataagcagtgctcttcacgttatccttaacttctcatctgctgtattatgatgaaagctgatactaaagatgatagccagttggaaatcttgacagccatgagttcttttattgtttagacatactttgtctttctcagattgtttttttttttctaacacttgattgttgaatttcaccctttttattattgaggcccattggtttgagttactcattctcttgattcgattgctgcttctaacttcttatctcctgagtttcattattgtgtgggagaatgtctttagctacagtgtaggttgctctaaatatggtcaacagaatctcaggagccatatctaatttttactttactctttcctattcagagtctttcatacagggctgcacagtgaggaactccttcagtagaggcctcagcatgtgcgggaccttgggcctgaaggtggacagtaatgtattctacaatattttaggtcatgcgctgctagttggtaagtaaaacaagcttgttgaatttctgcattcttgtgtaggacacagtttttcacaatgaattctccccaaatttctaattcctaatttataaaaatattggctttatgatcactagaaatgggctacagtaaaacattctaaatttaaatgtagtcatcactgattggcttactaaactttacctataggatactgatcttttaaaggttagttcaggttaataagtgtataatgggaagttttaaagtttactaccagtaattttcacaataattctaagtcacatgcatatgtctttgtatagtcttacagactgtcaaacttggatgttggccaaggatttaaaaatctggaattctcttcttaatagaattcaagctcctgtggcttgctgaagaagcccatgtttcagaatcttcaactgatcaactctatctacttctgtttcctaaagttcattccccttgcaaaactcagaattatccttaaaaatctcagattgcatcatatcacttctctcctttgagattcttattgcttttaaaatagaatcccaaacttttcaccagacttaaaagatcccttcagtgattttgtctctgttaacttctgtaaacttgtcttgttttttttctctttctccatactctagtgacattaaaatattttattttagttccttcaaaagaccacactttttccttcctcagggtctttgcacaagctctctggctctgttcatgccacttactcttctcttgcaacattctctctcccagacaagtccttctgtttaagctctttaagcgccaatcagtacttcttgatttaaaattatataccacatttctggtcatctgattaatgtctttataccaccggatttcttgaggacattgtctcctgaacacttagcatattaactagtgcattgtagatctattagttgaaagaaatgaatgaattaagaaacaaagggtctccagttttatcagaataaaaaagcaaatcagaggttttcactgaaagtgagaatataactgtatttgttaaataccgtttgatatttaattctatagtatcatcagtgggaaaaatacatgtttcatttaagaacaatctgttgagataaaagctataaaagttctatcctgagatggaaactgtctagtgagaaaatgtgaatcagatacatttgctttaaaacatactctagctctaaaagacaaaaactaagggtaactgaggtgatcaggtgcagaaaaatcttttgattagaaaaggacagccacagggaagtcaactaacagatgtaggattgactttgtttgttcctatgtttgtccgtgcaagggaaaaggtgaaacatcaaggagaaattgagaaaggtatcctaacagtattaccttagcagaaaacaattatgtggaatagatattaactatgcaaggaagaaaacctgtaggcagaatttagcctttagtgcttgaatgttgtgaattataagattttgacatctattgtattacaagtgagggaattaaaatttttgtttattgatgtgtggtgggtaaagcactcaatctcacacataacaagtatgcaaacccagacccatgaaatggcatgaggaagcctagatacttaaagactttgtaatgaagggttctttggggcagctctttattgatagcccttaagtgactaatttctctattagcatggcccatgcttgctcttctattccaacctcagtggtttgggtgagaaggtcctagatgttgtccatcctgttcctacaggacatttcagatcttccaagggaaggtgagggcatgcagatagcaggtggccagtttgaacagctaggaatggggttggtgttgacacaggatatgtggcacttaacagtggagatagtcacttagactcctcctcaaaagtaaaacagatctatttttctgttctttttatttaaaatgaacttctgattcctgatactctagaactgaagagtacataagatctgtatctctttccctgatttacagataaaaacacaaaaacaaaatcaaaacaacccacacccaaagaagtagtgttgcagcatctcttgttttcctaagtgacataaaatatactcaagtaatggggtcttttgttctcagggacatgcacggagatgagatatatctcctgggaggcaattcatggaaggaaagatggtaaatatgtaaattgattttaaatctattacagtgtatttaaaattgtcatatattttatagacaagcctgatggcaaaatgttaggtctcttaagtttattgtgcatactaaatattttctaaatatatatatatatatatatatatatatgaaatgcattatgtgaactctgatgtgtattagtagaatcaagggtgttgagttgagtacattttaattatgtttgtggatcccctggatttgttgaaacattagactggtcaggacatggaaatataataagaaacaacgtgatcatccaggtttctggtgccgagggactctccaatcctgaaatgttgacaccatctggcatctatatctgcagtcccaccaatgttatagaggtaagatgttcagctctaccaggaagaccagaactgagagggcataaagttctttctcaatcaggggtgtccaaccttttggcttccctgggccacattggaagaataattgccattggaagaattgggtcacacataaaatgcactaacgctaatgacagctgatgagctgaaaaaaaattgtaaaacaaatctcataatgtgttaagaaagttgatgaatttgtgtttggccacattcaaagccatcttgggctgcatacgacctgtgggctgccagttggacaagcttgctccaaaagttctttaaggtggcagcgttagtggtggtgtggtatgaaatgtttacttgctgcatattagtatcaagaaaataatttataattttgcattaaacaagtactttaggataaatgtaagcattcctctcaggatttctggaaacacttttttgaagcaataggtaatggagcaaaacaaagtagatattgatcgtttcctggtcatctaggtaatgcaaactaaaatatctccctgaactaccaactctgggtgctgatttttgtctcacttgattccaataccaatttctttttaaaccttcactatcttactatgttaatgtggccatattttgtcctttaagagtgttcaaaactgagacatgaggtgtataaggtcatgtcagattccaggaggatgaagtccacttcaataaccttgatttttaaaatcccattatttagtacaacttaacattggtttcccttggcacatttctgtttaaacatttaagaaattaatttttgaggggacaatgtagctgtagacctgagtgaacaagtgcatcagagtagtggcaagccatttcatttccccttttctaattattttatcccatggatcttctatcaaaggagttaagggcctcactgtttcaggaaactcctctcagcatccactatgtcattatgctgagtttctaaggaactcagaggatgagcttctttctcactgatcatctgtttttaattaccttcagctgaataaaccctagtaaaagtagtggttatctcttcttccttagattcttaattatgtttgttccaagcacagcactcacacaccattttaggtgcctaatgggagtggctaatatgccagtaagcaaaggaagcagaactacacggactgtaggaacccagatcccagatccaggacagctggagctgcatttaacttgttggtcactacaggccaaaaatcctaatgataattaggatttttttgttgttattttaaacttttaattttaaaataatttcagacttacaagaagctgcgtaaataaaagagttcctatgtgccctttctatgtctgtaagcttttgggcttaagaaaccatgtttttgtgtacttttctgggtagcataatgttgactacatcaaatgcctggaggaaagtaaaccctcagggttgcccagctcaccctgctgtgtgaagctggaatgtccttgtctcactgggtagtatgtggtctgctggacggagtgctggccactggctgacaagaagaagggttgagctggctgcaggtgcagagaaccagagggtaatctgaaaagctgtgggtggtgtgagcctttgcaaaatgacctgtagaataatacccagtcagcaatggaaaaattgagtctgcaactagctgcttgctctccctccaacgctttccatttcccttcatttactttcttactcttgtatctgctttacaaaattagaaaaaaaatacaatgcatatgttttgagaatggagttttaggttaaactggtaatgtagattcattaggtatattcctgacatatttatccttggtgaccttaaagttctttttttttttttttaagtttttttttcttttattattatactttaagttttagggtacatgagcacattgtgcatgttagttacatatgtatacatgtgccatgctggtgcgctgtacccactaacttgtcatctagcactaggtatatctcccagtgctattcctccccactccccccaccccacaacagtccccagagtgtgatgttccccttcctgtgtccatgtgatctcattgttcaattcccacctttgagtgagaatatgcggtgtttggttttttgttcttgcgatagtttactgagaatgatgatttccaatttcatccatgtccctacaaaggacatgaactcatcattttttatggctgcatagtattccacggtatatatgtgccacgttttcttgatgcagtctatcattgttggacatttgggttggttccaagtctttgctattgtgactaatgccgcaataaacatacgtgtgcatgtgtctttatagcagcatgatttatagtcctttgggtttatatacccagtaatgggatggctgggtcaaatggtatttctagttctagatccctgaggaatcaccacactgatttccacaatggttgaactagtttacagtcccaccaacagtgtaaaagtgttcctatttctccacatcctctccagcacctgttgtttcctgactttttaatgattgccattctaactggtgtgagatggtatctcattgtggttttgatttgcatttctctgatggccagtgatgatgagcatttttttatgtgttttttggctccataaatgtcttcttttgagaagtgtctgttcatgtccttcacccactttttgatggggttgtttttttcttgtaaatttgtttgagttcattgtagattctggatattagccctttgtcagatgagtaggttgtgaaaattttctcccattttgtaggttgcctgttcactctgatggtagtttcttttgctgtgcagaagctctttagtttaattagatcccatttgtcaattttggcttttgttgccattgcttttgatgttttagacatgaagtccttgcccatgcctatgtcctgaatggtaatgcctaggttttcttctagggtttttatggttttaggtctatcatttaagtctttaatccatcttgaattgatttttgaataaggtgtaaggaagtgatccagtttcagctttctacatatggctagccaattttcccagcaccatttattaaatagggaatcctttccccattgcttgtttttctcaggtttgtcaaagatcagatagttgtagatatgcagcgttatttctgagggctctgttctgttccattgatctacatctctgttttggtaccagtaccatgctgttttggttactgtagccttgtagtatagtttgaagtcaggtagggtgatgcctccagctttgttcttttggcttaggattgacttggcgatgcgggctctttttttggttccatatgaactttaaagtagttttttttccaattctgtgaagaaagtccttggtagcttgatggggatggcactgaatctgtaaattaccttgggcagtatggccattttcacgatattgattcttcctacccatgagcatggaatgttcttccatttgtttgtatcctctttgatttccttgagcagtggtttgtagttctccttgaagaggtccttcacatcccttgtaagttggattcctaggtattttattctctttgaagcaattgtgaatgggagttcactcatgatttggcactctgtttgtctgttgttggtgtataagaatgcttgtgatttttgtacattgatattgtatcctgagactttgctgaagttgcttatcaggttatggagattttgggctgagacaatggggctttccagatatacaatcatgtcttctgtaaacagggacaatttgacttcgtcttttcctaattgaataccctttatttccttctcctgcctaattgccctggccagaacttccaacactatgttgaataggagtggtgagagagggcatccctgtcttgtgccagttttcaaagggaatgcttccagtttttgcccattcagtatgatattggctgtgggtttgtcatagatagctcttattattttgaaatacatcccatcaatacctaatttattgagagtttttagcatgaagggttgttgaattttgtcaaaggccttttctgcatctattgagataattctgtggtttttgtctttggctctgtttatatgctggattacatttattgatttgcgtatattgaaccagccttgcatcccagggatgaagcccacttgatcatggtggataagctttttgatgtgctgctggattcgttttgccagtattttattgaggatttttgcatcaatgttcatcaaggatattggtgtaaagttctcttttttggttgtgtctctgcccggcttaggtatcagaatgatgctggcctcataaattgagttagggaggattccctctttttctatggattggaatagtttcagaaggaatggtaccagttcctccttgtacctctggtagaattcggctgtgaatctgcctggtcctggactctttttggttggtaagctattgattattgccacaatttcagatcctgttattggtctattcagagattcaacttcttcctggtttagtctctggagagtgtatgtgttcaggaatttatccatttcttctaaattttctagtttatttgcgtagaggtgtttgtggtattctctgatggtagtttgtatttctgtgggatcggtggtgatatcccctttatcattttttattgcgtctatttgattcttctctcttttttttctttattagtcttgctagcagtctatctattttgttgatcctttcaaaaaaccagctcctggattcattaattttttgaagggttttttgtgtctccatttccttcagttctgctctgattttagttatttcttgccttctgctagcttttgaatgtgtttgctcttgcttttctagttcttttaattgtgatgttagggtgtcaattttggatctttcctgctttctcctgtgggcatttagtgctataaatttccctctacacactgctttgaatgtgtcccagagattctggtatgttgtgtctttgttctcgttggtttcaaagaacatctttatttctgccttcatttcattatgtacccagtagtcattcaggagcaggttgttcagtttccatgtagttgagtggttttgagtgagattcttaatcctgagttctagtttgattgcactgtggtctgagagatagtttgttataatttctgttcttttacatttgctgaggagagctttacttccaagtatgtggtcaattttggaataggtgtggtgtggtgctgaaaaaaatgtatattctgttgatttgaggtggagagttctgtagatgtctattaggttcgcttggtgcagagctgaattcaattcctgggtatccttgttgactttctgtctcgttgatctgtctaatgttgacagtggggtgttaaagtctcccattattaatgtgtgggagtctaagtctctttgtaggtcactcaggacttgctttatgaatctgggtgctcctgtattgggtgcatatatatttaggatagttaactcttcttgttgaattgatccgtttaccattatgtaatggtcttctttgtctcttttgatctttgttggtttaaagtctgttttatcagagactaggattgcaacccctgcctttttttgttttccatttgcttggtagatcttcctccatccttttattttgagcctatgtgtgtctctgcacatgagatgggtttcctgaatacagcacactgatgggtcttgactctttatccaatttgccagtctgtgtcttttaattggagcatttagtccatttacatttaaagttaatattgttatgtgtgaatttgatcctgtcattatgatgttagctggtgattttgctcgttagttgatgcagtttcttcctagtctcaatggtctttacattttggcatgattttgcagtggctggtaccggttgttccattccatgtttagtgcttccttcaggagctcttttagggcaggcctggtggtgacaaaatctctcagcatttgcttgtctgtaaaggattttatttctccttcacttatgaggcttcgtttggctggatatgaaattctgggttgaaaattcttttctttaagaatgttgaatattggcccccacactcttctggcttgtagggtttctgccaagagatccgctgttagtctgatgggcttccctttgagggtaacccgacctttctctctggctgcccttaacatttttcccttcatttcaactttggtgaatctgacaattatgtgtcttggagttgctcttctcgatgaatatctttgtggcgttctctctatttcctgaatctgaacgttggcctgccttgctagattggggaagttctcctggataatatcctgcagagtgttttccaacttggttccattctccccatcactttcaggtacaccaatcagacgtagatttggtcttttcacatagtcccatatttcttggaggctttgctcatttctttttattcttttttctctaaacttcccttctcgcttcatttcattcacttcatcttccatcgctgataccctttcttccagttgatcgcatggctcctgaggcttctgcattcttcacgtagttctcgagccttggttttcagctccatcagctcctttaagcacttctctgtattggttattctagttatacattcttctaaatttttttcaaagttttcaacttctttgcctttggtttgaatgtcctcccgtagcttggagtaatttgatcgtctgaagccttcttctctcagctcgtcaaagtcattctccgtccagctttgttccgttgctggtgaggaactgcgttcctttggaggaggagaggtgctctgctttttagagtttccagtttttctgttctgttttttccccatctttgtggttttatctacttttggtctttgatgatggtgatgtacagatgggtttttggtgtggatgtcctttctgtttgttagttttccttttaacagacaggaccctcagctgcaggtctgttggagtaccctgccgtgtgaggtgtcagtgtgcccctgttggggggtgcctcccagttaggctgctcgggggtcaggggtcagggacccacttgaggaggcagtctgcccgttctcagatctccagctgcgtgctgggagaaccactgctctcttcaaagctgtcagacagggacatttaagtctgcagaggttactgttgtctgtttgtctgtgccctgcccccagaggtggagcctacagaggcaggcaggcctccttgagctgtggtgggctccacccagttcgagcttccgggctgctttgtttacctaagcgagcctgggcaatggtgggcgcccctcctccagcctggctaccgacttgcagtttgatctcagactgctgtgctagcaatcagcgagactccgtgggcataggaccctccgagccaggtgcgggatataatcttgtggtgtgccgttttttaagcccgtcggaaaagcgcagtattcgggtgggagtgacccgattttccaggtgccgtccatcacccctttgtttgactaggaaagggaactccctgaccccttgagcttcccgagtgaggcaatgcctcaccctgcttcggcttgtgcacggtgggcgcacccactgacctgcgcccactgtctggcactccctagtgagatgaacccggtacctcagatggaaatgcagaaatcgcctgtcttctgtgtcgctcacactgggagctgtagaccggagctgttcctattcggccatcttggctcctccggtgaccttaaagttctaattctattttcattagcctttagacactagcacaatttctaaaacatggtagttgctcaaaaaaaaatgtatttaatataacgaatgaaggtataaacctataaccaaattatgtgggggaagaaaaaggaaagtaaagaacaagttccaaagttctaaaatcattttgatgactgaaaaataagtttagtcagtggaagcatttagattctgttgggctatcagcattaaatcttgcaaagtctagtccagtttttcagttgtgccattggctttctgttattcagtctttttttgcattctattgtctgtgatgtgccattacttaaagacataggtggtaactgggtatacgtgaaaaaaacctgtgttccctaggcgagtctcaaactcttggtctcaagtgatctccccactttggcttcccaaaggattggaattacaggtgtgagccaccattcttggctgagttagtgttaattgtgtcctgtatggatgatatacagagtactttgaagaacatattttagaaatatacctttattccaaagggataataaggaggcttccacaataacaaggtgtgtgtgtatgtatgtgcatgtatttgtgtgtatgtgtataatatgtggaacagaaagagatgtgatagaaaattgtgattaattaggatttttctttgttgttattttaaacttttaattttaaaataatttcagacttacgagaagctgcataaataagagaattcctatgtgctcttcatctagctccctccaatgataacataacgataaccatagtcatggagctgtaccaaggccaggacattgacattggtatgatagtattaattaaacaaatgtatttatttagacttgaagaagatggcctaatcttcatgtttgggcaaccaactctgaaagcctaaactctctctcctcacatacctgagtctgaccttgaaatctctgacctggaaggtaggtaggcaggggaaatgattcttaagtctgtgcaatggtttgtggttttatattattctcaaattgccctgatgcagagctgggaccaaactctcagccacaacataaggaattcagctgggcttgcagtcagtcaccttgctagttcacttacattcaacctggcatgatgcaagtaaatttcaaatatgatattcttttttagttttgatgttcacaggtggtctgcttctctccctgcccagcctgcagctgaggtgagtccagggcagtttcactgagaagcaaaacctgagctttgtaccttcttgccagtgaggacccatgggtgataagtgcttgagtctccaggggcctgtggcattccctggtacatttcttaaataggcgtttgccatgctttccaaaagcaagttggtggtggttcttttgtgtatcacctgtagcttcttagagcgcttcaccctcaggctgtcttccctcagcagctccagctccggagtctaggacttctttgacaggagctccttgttatctgtcaagaggctgcatctttccagaagacataacctgtgtgaatctgttctcattctctctggttgggaagtctttgctctcaaacagcaagggactgttcacttccagagctcagagtctcccatgtttatgtaggtgttggaaatttcctataaccagacccctgtttaggatagtccgtggaaaaactctgaagaagagccctttggagacatgcatttaatttgaggagaatttgttctggtttgtgaatcaattttgtaaggaattctgtttaaaggcccaacctcagttctcaagctttccccactcaataggtaatgcatatttaagagctgcctgaagggttaactcactttttttctagtgactatagatgtacacctcaaggagctggcttacttgggcagttaatttctctctggaatttctcttgcttgaatgtccataatacattgacttccgcaaataattgatttccacacaaaattccctgcttgccttaaaccttccccgcaagctgccagctgcctgcataaatatgtggtttttcctcatgaatcatttgtagcatacacaattggagttgagagtaagaagggccaggaaggaatgcgatctgactgttaaagtgcttcttttgtaagaaaagtgagtcttatcagctaacagaggaccaaagttgcagtctcctgcccacctataaatgcgcttggaaagtgtttatatgtgatcacccagatgtgccataaatgctaatggcactagggcagatgattcaacaaacccatttattcagggaaacacgtgctttctgagcatctgtgctggcaaaggtgatgaataaggatgcagtccttggaatatattttttaaatttaagaatcttttctttcctcataaaatcttggtaatgaaatagcatttccttggtaatgaaatagagctgtgtggacaagtgagatgatcacttttagcttccagtccacatttctcattgtatacttgcagacaaggtgggtgtttaagaagcccccttctctggccctcggttcttatgtaccgctgacctttcccaaggctcgtggatatagagagacacacctagagaaggtggagtttcacttccctggggaaagtttgtgttgtgtaatcgtgactgagaacaacagctgtggtatttctttgtatatttacaagggctgaagagatacactgggcacttatatttgccaactaatagacagtgattcttcttgaggccaagaagcaggagtgcatactctgttttctagcacaagagaaaaattgagatagctgatttaatgctaataaatgtttttttaatgggaatgcctgatgcctcatctaatggttttaaatgatatcaatagtttcctagtaaagactattaaagcattcttattgtaattaaccatgttttcatatttaggcttgtctttccatcaaaatttggagatgggatactggaaaatgagtgtgggttattttgctaatatgtgactctagtgtagactatagaccaaggtttctcaactacgtcaatattgacattttgggctgggtaattccttgttgtcgagcctatcctctgtataacagcatccctggtatctatgcactgaataccagtagccctcttctctcttcttcatcctccaagttgttacaataaaaaatgtatccagaggctgttaaatgttccgtagggaacaaagtcatccctgattgacaaccaccactctagactaggccaccctaagaccattgaagtcttagaaatggacctgattctttgaagtcgtgttggcatctttgatagtgattcatcttaatattcagtgatatccaaaagtcacttttggtgagcaccctgtggtaggtgagacatgtgattagaattctaagtgcttttaggaaattggagaattgctcagactccaaaataatgaagtgcaggagtgactcggccaattagtccacaaaggaacaaaacatcctgtaaccgaatgaaaaatgaggaagaaatggctgtctatttacaaatacccagggtaagaacctttgggacccacagtgaattgaagctaaagctaaataaacagcccggggcaattgtgtcagtatgtgctggcctccctgaccaggtcctggctgctgcctgctggtcaggcttctagtttcagggggaactctggccctgactcacacttcccccaaaactgaaggcctccaggggttgaggcattggttctttctgtcacacaaggcagggaattgggcgttattgggttaagagcaatctttttcagttttctcccccatactgtctttgcttggctgaatgtgtgtgtgtgtgtgtgtgtgtgtgtgtgtgtgtgttccttgtggaacatgtggtacattcaggaaggaatagggtctttaagttcttctcctgttgggggtgccgctatattatcactgccagtggatcagccatgttcagagagttacccttaataatacctaaagttggctgggcacggtgcctcatgcctataatcccagcactttgggaggccaaggtgggcggatcacctgaggtcgggagtttgagaccagcttgaccaacatggagaaaccccatttctactaaaaatacaaaattagccaggcatggtggtgcatgcctgtaatcccagctactcaggaggctaaggcaggagaatcgcttgaatccgggaggtggaggttgcggtgagccgagatcgtgccattgcactccagcctgggcaacaagagtgaaactccatctcaaaaaagaaaacaaacaaacaaacaaaaaaacaaaaccccaaaacctgaagttttcctttcatttggaaattaaagtcaataaaaatattagtctagaatgactgaagccataggatgaaatgagtttacttagtctaaggataaagaaatggagaatagctacaagtaaaagggtatggagtcctcactctcaatccatccttactgagaatgtagtaaaactccctgagctgtgtgaaaggctagtgcaagaccctgtccttggatgggtcagaacttcctcattaaattctaacccttgtctgcattcagtccatagccctactgtctgcactgatagtagatgacaactgcagataatctcagtcttttcatctgtcattgctcaaaattcctgtgtcagaagccagtcctcatcaacatgtctcagccttaataacacttgatctccataatgctgaaattccagaaccctcatcctccttaaatgtactcttcaaaatgtcatgtcttcttcctactcttgagaaatgtcccacacccctacccatgtatctctctgtgcacgctaagctgtgcatgcttttttccccatgtggtgagaatgagaaggattttacattctctggatttggggtgtgaaaagagcaactccttagttaaatctggcctgcaagatgctctccagatttggagaaatcaaacactacctccggtgccttaaggattaattcactttttttttttttctggtgactatagatgcacacctctaggagctggcttacttggacagttaatttctctctggaatttcccttgcgtgaatgtccatgatacattgacttctgcaaaggatgttgttcaatatgttgtctccactactggggaggccacagcaaatgcctgttctgtccgtgaccgggtgacaagacttttctttgtactctcttgtttatgtttcttcacttgcaccctattattgggcatcctgcctttgggtcctaccttcatttctctactctagtctctaacttttccagacttggacttggatggagctggctctgacaactatttgctctgtgactttgggaaagttactcaacatctctgagcttcagtttctttgctatgaaactgtaataataatacaaaactcataaaactattgtaaaaataaatgagactctaaaatccagtacctggactgtagtgccttctctgtagattttcactatgagtgttattattctactcatcattacttaaaaaaaaaatacttctaagggaaaaaaaaaatccaccataaatataacttgcactgagctgggcagcatttttgctgggtacctggcaatggattctccccctgatttctaggtctctatcctccttcagttttcagcagtggcttccatttgcagtgggttcccaaagcaactcatggcaaaaaacttcaccaggaagtggtttttctagtgtctctctcctctttgaatgtctcctaggaacgttagtaacccttagcgttactctctcaatcacctgtagagaagtagttctcaaaatggggtcaaaatatcacctgcagcagacctatcagagcaccttgtgatggccaagagtaaagaatactgtccctcatcccttcctcatcacccccctaataaatcaaaatatctaaaaacctttggctaatatacccccaggtaaagcctgccagataaaatacagcatatttggtcaaatttaaatttcagatagtgtttgcgacacacttatactaaaatattttattttttatctgaaatttaaatttcactgggcattctgtgtttttatttgctaaatatgacaactctaccaggttgcacacgaaagtttaagaaactgttccaaggggatgctcacagcgtagtccccactgagccctgcatagagggctgcactgaagtattgttttttaaagaaaggcatttaatgtcttgttgagtggcacagtgtcatggtccttatgactccccattctctttactgtgaccctaatgccagtgttcaggatgagctctccaagccccatagtttgtgttcccgggattgagtgacttccaaggaggatactccagacattccttgtctcgcaccagccaggccatggaaaacccccaggtgatcaggattgaatcatgtgggagccttggagactcccttcatctatgtagcacagggcttacacctgagcagcctattccttaacttctgttctccaggtagacatgggcatcttgactttggacaaccactcagactgagagaggtcagatgcacgtgggcacataggaagtagtctcatagcttgatcgattggccctttgttcctcccactaatagcatcactgcagtgcagcagcctgatagggccccgatttttctcagagttctttctccctgatgataaagagaaggcttgggatccttaagatgtgagcgtgtgacactgagagaactcagatgtgattcaggaaagcagaaatagaaactttcatagaatagccaacatgttatttactttgttgcctgtagttgaggttgcaaattcaaatactgcagagactaggcagggatcataaatgagtgaaccaggaagggtgaggactgtggaaaaatcatccacagtccaagaaggaaggcccttcttatcttcacctgacctgtggctacttcacaggaatttgggctcagaaaagctgaaagtctgaattttttattaaatctcttggtttgaacatgttggaaccaaaaaaatatgaacattgggtaggccaaaaaaaaatacatctgtgtacagtcttaaacctttaggaagtcagttttttaatttgtcttaagtctatgttacatagggatgaacatattgtaggtacttcattgaatttataaagataacctcattgtgttcagtttgatcagaattagatccccaaactcatatggtccaagagagagaagtcagattttatatgaacacataaaatacatgaaattatttagatagtaagacctataaagaaatatcaaggcgacttaatagtctattcaggacaagagcactttgaagagatttgagttgtagttgtactcagtcaccctgtcttggtactaagtcatgactggtccaatcatgtggccttcagccaatagacaaatcgttgagttgttcaaagagccagagagaacacattgtgtaggcttgacttcaaggtacacctttgccttggagagctaccatatactgttgcattcaccaaagaggagaattttagatgtcatgagtaaactcactgtggaagcttagaaagaggcttgagcatgagataccagttattaagatgggcaaattgcagtctagttgagctggctggaggaagaagaatgacaatatttttattagttcattctcgcattgctataaagaaatacctgaggctgggtaacttataaagaaaagaggtttaattggctcatggttctgcaggctatacaggaaacatggaagcatcaatttctggggaggtctcaggtctcagggagcctttactcacggcagaaggcaaagcaggagcaggcaacttacatggcaggaacagaggcaagacaaggtgggagccacaaggtgctgtacacttttaaactaccagatctcatgagaactcacttactatggtgaggacagtactaaggggggacagtgctaaaccattcacgagaaactgaccccgtgatccagtcacctcccaccaggccctacctccaatactggggattacaattcaacctgagatatgggcagggggacaaatccaaaccatatcactatttttgttcccaaaaggaaaaaaaaagaataaatgagtctataatagagttttaatgtactttggcagaaagtgaatataaaattgggatgagtacaaacaagagtctttctttccagcaaccttatcatacatggggtaactattttttaactcttcttaatttctgtaggggaacagagtgtgtggtgctggctatggctactttttccatctcatgaccaaccaaacatcacaagctccgcttctttccttcactcagaacattgcacattcttgtaccaggtaactttggggaaattcatctatgttttggctgtcttatgatttcacattttactgtagaatgctcacaatgagagcactttgggcatttgttggagattgggtgatgttcctgtgcattttctgaaactgcttttttgaggtataattgacatacaaaaagctgtccatatttaatgtatgcaacttgatgagtttggagataagtatacacccctgcaaccatcatcaccatctgtgtcacaaacatatctatcacctctaaaagttttcctccagagcctctttatttgaattattattattactgtaagaacgtttgacacaaaatctgacctcttagcaaatttttaagtatagaatatagtattgttaattttgctgtattctatactttggcattttgccatactgtatatctctaggacttattcattttgcatagctgaaactttgtaccctttgactaatacttcccattttcccctccttccagcccctgccaaccaccattctactctctgcttctataagtttgaatattttagatttctcatttaaatgatatgatgtactattgcccttctgtgtctggcttacctcacccagcacagtgtcccccaggtttatctgtattgtcacaaatggcaggatttccttctctttaaaggctgaataatattccattgcaaatatacaccacattttccccagccattaacctattgatggacatcttggctgcctctatgtcttggcttttgtatataattgtgttagcattattttctagatcataacagttcgatggtaaagagaagagagtcacatgaaaaggcagaaggacagaatgtaccttttgtggccagagataattcaatagagagagcaattaaacttccaaatatgcagagcccctgggaggctgctaggcttgggctctggagtaatctgcattttgttgggattcgggagcaggtcacagagggtaaaagtgggagggctgaggggtaggcaagaacagttagggggagggtcacagattccatctaccttcattctccctaatacattacttttactttgtatttttcaacaagaaaaagtagaaagttagaaacataaaaattggcttaatttcattctgtttcactttttaggtatggtctctttgtataccctaaatttcagccaccttgggataatgtcactggcaccactctgttccagagcttcacagtttgggaaagtgcaggtggtgcccaggtaagcttttttgttgttgttgttattgttgttgtttttaaaattaaaactgtcacttgttttctcacagcaattcattatgcatatctacttaaatgggattgacttgcccttgaggggagcattgctgtgctgtcacaattttaaagcaccaatggatcataggtgcttgtagaatagttgttaaacaaattcctagtcactaatccagggttaggtcattttctccattgggtgtttttggcaaccctagaagagaacaacagaatcataaagatttataatcaggggagatcacagaggttccctattccttctttccatctctacttagagatagaaattaaggctaagaacgggaagggacttgtcaaagatcacacaattggttagtagtacaaccaagtgcagaatttagactccaaatgttgtgcatttgatgtcccgatatcctgaataatacatgccccagtcttaagaaaaagcactgttcgtcattgatacacaaacattctagctcaagataccactcttactttagaagaaataagctaaattttcttctatttttttcttaaaggaaaagaaaaggttcatgttcaatcatttactcttcattatcccaatgattttcttataaggaagctttgcatgctcactgctaacagcaacatgtaaaaattattcagggtcactatttgatgcaatacagacaaaattacatacactttgtctctgcctagaaatctggaacataagatatataggtgaagaactatgtttgtagagccttcaggaaatagaatacaaacatataataatgtcacaataagaaagtcaaacatttgtttcatatatcccataaaagaaagataactgtggatgaagaaagcccaaaaatatacaattaggacagctaacaggtggagtccgaaatgtatttagtattttgttctcatttaattttataaaatgcttcccatgagcactataaatataccctataggggtaacaaatctagtggaaacatttgttgagtgccctcttatgcagagaagtgatttatacctgcaggggcttaaactctgtctccctgctcttgagtagcctggttctagaggaaataatctagtaaaatgaaaatattaaaagatgctaataaagccattttttgaaattctgcaatcagaaatgctaaacctatgaaggaaaaaaatacagaactacaacttgaactcttgtgcactcaaatttgattaatcaaaaagtttaaataataaaaatattcttggaattgcacttttatagtgaagaataaggggaaaattaagtaacataatagcagcaaatttaaaacgtaaacttccctcgaactataccaaaaaagaagaatgaagtaagaggatttatccttccctattttaaaacttgctacaaagcaacaataatcaagacagtgtggtatatgggcacaaagatagatatatatgtcaatgaaatagaagtgagagtctggagataaacccatatatctataaacaaatgatttttgacaaaggatgccaagaccattcaatgtgggaaatatagtcttttcaacaaatggtgcttgtataactagatggtcacacacaaaagaattaagttgtatcctaccttaatttatgctacttacaaaaattaacttcaaatgagtcattatgtattaataataaataaaattagcaaaaaattggtcaaagacgtaaacataagcacaactctgtctcccagaccagtggtgtcttagtcccttttgtgctgctataacagaataataaaatttgggaaaattataataaacagaaatttattagctcatgattctggaggcttggaagtccaagattgagaggccagcatcttctgaggaccttcttgctgcatcagtctatagcagaagggcaaagaagtcaaagaaggagcaagtgatagaactcacagccccaagttttttttgtaatcagcactaatccattcataacctacacacctcctaacactgttatatcagggattaagcttccaaaacatgctttttcggggacaggcttaaaccatagcaagtagtagacttacaactctaccaagctaattttgttattatatgacccctgtttgggttatcataaacatatatgtacataacttatgttgaaattacaaacagtgactctgtagtcatgctgagctgcttatttcatatttgcaatcttctgacagtatgagttaatatataatacattgaagaaaatgttaagcactagagttcttggatgcaatgtttttctctgttacctttgtgtgatttggccactccaagtttattttagatatgtggagaattcatattgatctttttaatgtattggttattatgaggagaaatgaaaagtacaaaggggtgttaccaaaggagactcattagtgctgacctcacagcaacttgaggatgcctatactgacattgatggacaaaaggtgctttaatacaatatagcatgcttctttctacttaatcaataattttaaaagctacaggaagtccgcaagaaaaaccaagcctcagacctttgctgtaacatgctgtattttatagatttttagaagtagcaatcttcgcctgaaaaacttcaaagtttattcatgcagagattttggaattgacgtcttggaaagtgatgcaaatacttcagttactgacagcttattacttggtcattttgcccacaaggtaagtgccttagtgtggttgttttaggctgtcaatcacaacaaaattacatgtgctgggccccctgatgatccaggatatgcaattttaatagcattctttagtgaatctcatatttaattagtaaaagttaaaagacctttttatttgtaatagtggtgatattgataatagaactcatatatacacagtgctttagtgttatgagtacagataaatcacagaagtcataagtagctgacagaattttatttggttgcaatttagaattattactcatagtaagaggtcaaatcatgaaatagaaatttgcctagttcgttattttgtatgtgattcactaatatgtgcctaagtatggatttccacatgataaaaatcagactctagatgacttctcagggtacaaggatgcagatggggcaaagagtactcccgggtgggaagcactagttcctaagtgggggttcctggctgccattggtctcttaggcttcaggtctataatggatcccctatgttcttgtttttattagaactacattcatactagtcatcacatcattatggaaatcatagatttattgggagccaaggaagaatattctcttcagtttgttcctgagtgcttagttcaattgaaatttaaatgataagttttgattcttatacttccattgaagattatttatttcacagctatagataaaaatgtgaagattttaaaagtcattttcttattgagctacattttcctggatttaactctcaacttttcttagtaaaatctcctttgaactatacttttcaggagataaataagtgccagtttttttttccctctaaaaggattaccaccttgagagatgattcttcctttcagactgtgtagttttcaagagaggatggtacccagatttagattctgtgatgctgtggtacatcagaggtccttaacttttccagaaataaccttagagtagatgttaaaaacaaaattcccagcaaactgagtaactgtcttggtaaattaatgttgcagtatcttaattgatgttaaatagacatcataattaatgggaaagtgacaaaaattaagatgtaaattatgacaaaagggtggctatcatgagataatcaaaaataatcacacccttggggtgtaattcactaggaatgtagtacagctgagggcctttcagtctcttaagtaagtgcaggacaagagtcccctggtggaaaatgttaaacagttttgttctaggggatgtctagatgctggttagttatccaaatcataaaaccacataattaaagagccaactattacctaagagatgatctggttaacttcttgaacttaggggaaaatggaggcttggaaacttgaatggcagtttaaggttcatgcctagtattgtggagctaggaccaccctgatatcctcccactcctggtcaaatattcttcaattgcacatggaaaatggctttggcaaaggacatttattagtgttcataccaatgttccctgaagtgtttttcatgaaaagctagcccttagatagtgtctggaaagagaagattatttggttataattatatttatactgtgctgtttaccgtaccctctatttcccaaaatctccaacaaatccagagatgtaatgtacaacataagcattagagataataaaattgtattgtgtcagggaattttgttaaataagtggattttggctgctcttgtcacagaaaagtaactgtgagataatagatatgttgatttgcttcactataacctatgtgtaccctgtaatatgttgtaaatctcaaatatacagaataaaattcattgaaaaaatacactaaaggctctgagaaattctagcattaaagtgaacaagcaaaaaaaaatctattaatctttacttagcacagtatttttcagatttatttgggaaccactatgttgccaggtgtcagttgttccaaaaaaagaaaaaaaaaaaaaaaaagaaagaaaaagagggttcctgacctctgtggttatgggactctgattttagcctctgtcttttgtgcctgccattcctttaggaattaacactttcttttttttttttttgagacggagtctcgctctgtcgcccaggctggagtgcagtggcgcgatcttggctcactgcaagctccgcctcccgggttcacgccattctcctgcctcagcctcctgagtagctgggaccacaggcacctgccaccacgcctggctaattttttgtgttttttttttttttttttttttttttttaatttttttttttattatactctaagttttagggtacatgtgcacattgtgcaggttagttacatatgtatacatgtgccatgctggtgcgctgcacccactaacgtgtcatctagcattaggtatatctcccaatgctatccctcccccctcccccgaccccaccacagtccccagagtgtgatattccccttcctgtgtccatgtgatctcattgttcaattcccacctatgagtgagaatatgcggtgtttggttttttgttcttgcgatagtttactgagaatgatggtttccaatttcatccatgtccctacaaaggacatgaactcatcattttttatggctgcatagtattccatggtgtatatgtgccacatttgcttaatccagtctatcattgttggacatttgggttggttccaagtctttgctattgtgaatagtgccgcaataaacatacgtgtgcatgtgtctttatagcagcatgatttatagtcctttgggtatatacccagtaatgggatggctgggtcaaatggtatttctagttctagatccctgaggaatcgccacactgacttccacaatggttgaactagtttacagtcccaccaacagtgtaaaagtgttcctatttctccacatcctctccagcacctgttgtttcctgactttttaatgattgccattctaactggtgtgagatgatatctcatagtggttttgatttgcatttctctgatggccagtgatgatgagcatttcttcatgtgttttttggctgcataaatgtcttcttttgagaagtgtctgttcatgtccttcgcccactttttgatggggttgtttgtttttttcttgtaaatttgtttgagttcattgtagattctggatattagacctttgtcagatgagtaggttgcgaaaattttctcccatgttgtaggttgcctgttcactctgatggtagtttcttttgctgtgcagaagctcttgagtttaattagatcccatttgtcaattttggcttttgttgccattgcttttggtgttttggacatgaagtccttgcccacgcctatgtcctgaatggtaatgcctaggttttcttctagggtttttatggttttaggtctaacgtttaaatctttaatccatcttgaattgatttttgtataaggtgtaaggaagggatccagtttcagccttctacatatggctagccagttttcccagcaccatttattaaatagggaatcctttccccattgcttgtttttctcaggtttgtcaaagatcagatagttgtagatatgcggcattatttctgagggctctgttctgttccattgatctatatctctgttttggtaccagtaccatgctgttttggttactgtagccttgtagtatagtttgaagtcaggtagtgtgatgcctccagctttgttcttttggcttaggattgacttggcgatgcgggctcttttttggttccatatgaactttaaagtagttttttccaattctgtgaagaaagtcattggtagcttgaaggggatggcattgaatctgtaaattaccttgggcagtatggccattttcacgatattgattcttcctacccatgagcatggaatgttcttccatttgtttgtgtcctcttttatttcgttgagcagtggtttgtagttctccttgaagaggtccttcacatcccttgtaagttggattcctaggtattttattctctttgaagcaattgtgaatgggagttcactcatgagttggctctctgtttgtctgtttttggtgtataagaatgcttgtgatttttgtacattgattttgtatcctgagactttgctgaagttgcttatcagcttaaggagattttgggctgagacgatggggttttctagataaacaatcatgtcatctgcaaacagggacaatttgacttcctcttttcctaattgaataccctttatttccttctcctgcctgattgccctggccagaacttccaacactatgttgaataggagcggtgagagagggcatccctgtcttgtgccagttttcaaagggaatgcttccagtttttgcccattcagtatgatattggctgtgggtttgtcatagatagctcttattattttgaaatacgtcccatcaatacctaatttattgagtttttagcatgaagggttgttgaattttgtcaaaggctttttctgcgtctattgagataatcatgtggtttttgtctttggctatgtttatatgctggattacatttattgatttgcgtatattgaaccagccttgcatcccagggatgaagcccacttgatcatggtggataagctttttgatgtgctgctggattcggtttgccagtattttattgaggatttttgcatcaatgttcatcaaggatattggtctaaaattctctttttttgttgtgtctctgcccggctttggtatcagaatgatgctggcctcataaaatgagttagggaggattccctctttttctattgattggaatagtttcagaaggaatggtaccagctcctccttgtacctctggtagaattcggctgtgaatccatctggtcctggactctttttggttggtaaactattgattattgccacaatttcagagcctgttattggtctattcagagattcaacttcttcctggtttagtcttgggagagtgtatgtgtcgaggaatgtatccatttcttctagattttctagtttatttgcgtagaggtgtttgtagtattctctgatggtagtttgtatttctgtgggatcggtggtgatatcccctttatcattttttattgtgtctatttgattcttctctctttttttctttattagtcttgctagcggtctatcaattttgttgatcctttcaaaaaaccagctcctggattcattgattttttgaagggttttttgtgtctctatttccttcagttctgctctgattttcgttatttcttgccttctgctagcttttgaatgtgtttgctcttgcttttctagttcttttaattgtgatgttagggtgtcaattttggatctttcctgctttctcttgtaggcatttagtgctataaatttccctctacacactgctttgaatgcgtcccagagattctggtatgtggtgtctttgttcttgttggtttcaaagaacatctttatttctgccttcatttcgttatgtacccagtagtcattcaggagcaggttgttcagtttccatggagttgagcggctttgagtgagattcttaatcctgagttctagtttgattgcactgtggtctgagagatagtttgttataatttctgttcttttacatttgctgaggagagctttacttccaactatgtggtcaattttggaataggtgtggtgtggtgctgaaaaaaatgtatactctgttgatttggggtggagagttctgttgatgtctattaggtctgcttggtgcagagctgagttcaattcctgggtatccttgttgactttctgtctcgttgatctgtctaatgttgacagtggggtgttaaagtctcccattattaatgtgtgggagtctaagtctctttgtaggtcactcaggacttgctttatgaatctgggtgctcctgtattgggtgcataaatatttaggatagttagctcctcttgttgaattgatcccttcaccattatgtaatggccttctttgtctcttttgatctttgttggtttaaagtctgttttatcagagactaggattgcaacccctgcctttttttgttttccattggcttggtagatcttcctccatccttttattttgagcctatgtgtgtctctgcacgtgagatgggtttcctgaatacagcacactgatgggtcttgactctttatccaacttgccagtctgtgtcttttaattgcagaatttagtccatttatatttaaagttaatattgttatgtgtgaatttgatcctgtcattatgatgttagctggtgattttgctcattagttgatgcagtttcctcctagtctcgatggtctttacattttggcatgattttgcagcggctggtaccggttgttcctttccatgtttagcgcttccttcaggagctcttttagggcaggcctggtggtgacaaaatctctcagcatttgcttgtctataaagtattttatttctccttcacttatgaagcttagtttggctggatatgaaattctgggttgaaaattcttttctttaagaatgttgaatattggcccccactctcttctggcttgtagggtttctgccaagagatccgctgttagtctgatgggctttcctttgagggtaacccgacctttctctctggctgcccttaacattttttccttcatttcaactttggtgaatctgacaattatgtgtcttggagttgctcttctcgaggagtatctttgtggcgttctctgtatttcctgaatctgaacgttggcctgccttgctagattggggaagttctcctggataatatcctgcagagtgttttccaacttggttccattctccacatcactttcaggtacaccaatcagacgtagatttggtcttttcacatagtcccatatttcttggaggctttgctcatttctttttattcttttttctctaaacttcccttctcgcttcatttcattcatttcatcttccattgctgataccctttcttccagttgatcgcatcggctcctgaggcttctgcattcttcacgtagttctcgagccttggttttcagctccatcagctcctttaagcacttctctgtattggttattctagttatacattcttctaaatttttttcaaagttttcaacttctttgcctttggtttgaatgtcctcccgtagctcagagtaatttgatcgtctgaagccttcttctctcagctcgtcaaaatcattctccatccagctttgttctgttgctggtgaggaactgcgttcctttggaggaggagaggcgctctgcgttttagagtttccagtttttctgttctgttttttccccatctttgtggttttatctacttttggtctttgatgatggtgatgtacagatgggttttcggtgtagatgtcctttctggttgttagttttccttctaacagacaggaccctcagctgcaggtctgttggaataccctgctgtgtgaggtgtcagtgtgcccctgctggggggtgcctcccagttaggctgctcgggggtcaggggtcagggacccacttgaggaggcagtctgcccgttctcagatctccagctgcgtgctgggagaaccactgctctcttcaaagctgtcagacagggacacttaagtctgcagaggttactgctgtctttttgtttgtctgtgccctgcccccagaggtggagcctacagaggcaggcaggcctccttgagctgtggtgggctccacccagttcgagcttcccagctgctttgtttacctaagcaagcctgggcaatggcgggcgcccctcccacagcctcgttgccgccttgccgtttgatctcagactgctgtgctagcaatcagcgagattccgtgggcgtaggaccctctgagccaggtgtgggatatagtctcgtggtgcgccgtttcttaagccggtctgaaaagcgcaatatttgggtgggagtgacccgattttccaggtgcgtccgtcacccctttctttgactcggaaagggaactccctgaccccttgcgcttcccaggtgaggcaatgcctcgccctgcttcggctcgcgcacggtgcgcacacacactggcctgcgcccactgtctggcactccctagtgagatgaacccggtacctcagatggaaatgcagaaatcacccgtcttctgcgtcgctcacgctgggagctgtagaccggagctcattttttgtgtttttagtacagacggagtttcaacatgttagccaggatggtctcaatctcctgacctcgtgatccgcccgccttggcctcccatagtgctgggattacaggcgtgagccactgcgcctggccaggaattaagacttttaaagaatttggcctgtccattgttagactttccactcatatataattggtggcatacaattatctgtgagtcacatcctaaaataaacattactttctggaagaactttttatcatcagaaggaatttttttcctttaagcatacctgtacgtgtgttggtactctcacagccaatgttacctttgtattgagatgaatagaataattttcagtacgaatgacttaaatatacaagaaagacatgtgctatatagcatgacgatatatcctagtttgggtgcgtagtttgtttatacctattgtcccagcattctgtctaattaacataccctttcacactaaaaaaaatgtctaattttaatttaaattacggtcaccctacttatcgaagtatctgtaggatggctgtcttcgttgttattgtaattaatttgagcagatgatgctactttaaaaaataccgtattcagacagatgctgatggagttgcttcattcttcctcctatttctctaggggtgatttcccattttcacttgtggatttgtcttcttcaatttagacctttcatctttttgtttccctaaattctgttgtagggccccttttcttctcaatatactagctctccctgggagaaatctcattttctctagtggtttcaattaccttccacatgctgatgtctcccatatatttgcatttatttctaccatcttattttgcactttcaatttgcaatccgtttttggtttctgtttttttcttcttttctattttgatttgtcttgtgttgcatatttttatatttactcatttgaaagttatccattctgttatgattattttagctattggccttaagtttttaatgtgcctgcttgtcttaacaaagtctaaattacatcagcactgttaaactttacataagtaatgcaaggacattaaactcctttagcttctttccttaccctctcatcttctatgttacctttctctagtatttgtcctactttttaaggtaaatgtttcatggaaatataacatttatggagaaatgtgcacaaatcataggggaatagctcagtggatttttacaaagcaaaccaaccatgtatatgtatacaactaagaacaagaaatagaacattgccagagcaagatcctgtctctaaaaaataaaaactaataataaataaatgaacattatcagctcctctaaagcctcttcttgtccccccattcaaccccactccgcacgccctagccaaagggcaagcattattcagccttctatcgatatagattaatttctcctgttttttaagttggtctaaatggaatcataaagcatgtaacttattgtacctggttgttttcatcatttgtaagtttggttatttacaaataataatgctataagcattattctatatgccttctggtcttcatgtgcatgcatttctgttgaatataagccaagttgtaaaattgctggatcatcgtgtaactttagtggataatgccaagcaacaatccagagtttatgcttacaccagcaatgtataagaagggtttcaaagctccatcttagaatctcccttgaacattatcctggagatttccttcatgtctgtctagtattggaactcttgtttctgattcgtacatcttcttcttttctggcttaattcctcattttgtttgaacataccctaaggtaactttctgaaaaaaaaaaaaaaaaaaaaaaaaggaaacgatggaaggtgaaagttctgagctatatatggagacccctttattagtagattgttggttacaggataccaggttgaagttcattttgcattgaaattttgaaggcaatattccatcatcttgtagctccttctggtcttgaggctgaatagttttaagatactcagattcagtggctcacacctgtaatcccagcagtttgggaggccgaggtgtgcagatcacctgaggtcaggggttggagacctgcctggccaacatggcaaaaccctgtctctactaaaagtacaaaaattagccagatgtggtggcaagcacctgtagtcccagctactcgggaggctgaagtaggagaatcacttcaacccaggaagcagaggttgcagtgagccgagatcatgccactgcactgcagactgtgcaacagagtgagattctgtctcaaaaaaaaaaaccaaaaaacaaaaactcagattccaggatttttgtacgtaacttattttttttctctctgaaagctcttaggaacttgtccttgtccctggtgttttgcaatttcaatatgatgcactttgctgtggctctttttctaaacattgtgctagatactgagtgggacttttcagtctggaaaattatatcctttccttctgcacagtattcttcaattatttctttgataattctttcccctatgttttcctcttttccttaaagctatgattatttaaatattgggcctcctggaatgtttttctcatcttaatgttcttactgattttccatctctttgtctttttgttctactttctatgatattgaattccttttttctactctcctatttccttttttttctaaaaataatattttaggcttctatttgtttcatggatataatatacttatttctccaaggccattaattatagtttttgttttcttctgatttctagactagctttgtgtccactgagtttcttttctgctatttgtttattgtttcatcatttttcatgttgggagtgattgcaaaaattctggtaatcctcaaatgtaagactatttttaacaatggaacagtgaggcactagcagcttgattggatagtgtttgtcaaagagattttgtggaaaatcatgaaaacacttattgtttctttcttttcagactttttgttaaagtttttaaaatatattaatatacagcaaaactgactttttgatgtacagttctatgagctttaacacatgtacacatttgtgtaacaaccaccacgacaatcaagacacagaacagttgcatccaccccagttccttgctccatctttgtagccacagcctcctcttgctttaaaccactggcaatcactaatatattctctgtcactatagttttgccttttcaacagtcatataaatggagtcatatagtatgtaaccttttgggactggcttccttcactcctgaatgccattgggattcatctaacttgttgcacatatcaatattacattccttattatcgacgaatagtattccattagatagatgtaatgcagtttgttaatccattcatttattgaggtgcacttgacttgtttccatatttggtgattataaatggaactgttatgaacatttgtctcaggtttttatataaatgtaagttttcatttctccaaggtaaatacctaggagttgaattgctaggtcatatgataagggcatatttaactttataagaaactgccaaagttttccacagtggctgtctcattttgcattccactagaaacaggagagttttaatactttctcatcctcatcagcacttactattgtcactgtatttttatttattcattcaataggtgcatagtatattttagtgtgatcttaatttgcatttccctagtgaataatgatgttgaacattttttttttctgtgcttatttgctatctgtatattttcttttctgggttatcttttgaaggtttttttttcctgatttttgaattgcgttgtctattttcttgctgttgaaacctaagagttctttctatattctggatataggtcctttgtcatatgtgtgattggcaaatattttctcttagtcaatagctcgcttttttatctttgtttttattcatgcattatgaattgtatttcatgtgtccagttttcttattttgctttcatctttttttcttttaaatcacagggaagtctgtgtatgtcatctgggattaaaactcctaaaagatgggaactgatggtgtctaacacaacctttgttaattttgatctcatcaactgtgtggccattagaacctgttcagactgttcccaaggacaaggtaattatttgaatagacagaacagatgataaataaggcccatattcaagtcagtattataaatagtggcaaatactttgtgaatcattatctctttcagttataagattgcatcagtagaaactgttgcttaaatctcctaaaagacatcctggaggttctcccagtacagcttctgcagctccctgtcctgctcctattatggtgcctatcacattctatcattatggtcctatgtctctgctggactctgaccttcataaaggcagagatcatgtatttcttgctcagagttttaattattagtagctagcacagagccagatgcctagtaggcagtttattgattaaatgaaagaatggagttagatgggtagatacctggtataaactaacatgcatacagcctttcctgaaggagccaaagttcaggtacttaatgttttcaacagtccagggcttgatgtatgcacaaagggaaacataggagttcttgctcactttttaaccacatctcagaggtggtaagaaataacttggaggactcatgggccaaggtgaaagaggtagagagtaatctagttgatttgatcatcgtaaacagccaaaccaagtaatttaagtaaatatgctcttgtggtttgaatcaccaatttagataattgtttgtttttttaattaaatgaataatcaacaagtctccactttacttttttttcctatgtaggcagaatgaaagattgtttttatttgggtggcatctgagtttaggattgtagaaataataatagaaataaaaatgcctcataacaagtgcttgcaatcgcaattcctcaattctttaatatcttgactatttcatatcattcatgagacagtgaaaaaaaatcacactactcctatgaactctaatcccttttcactgaatagtattggctaacccctcttttcatttgcttaaataccatctatttcaggctctgcttaaggacctagggggtacaaatataaaaaacacatagtttctgtcctccaggaactcttgatctaggcactaaaataaatgtccaagcctattattgtaagagagcatgatgaacgcagtaatagaggactcaacaaagtcagtgaaggggccgaggaagggggtcaggcaagagctcatagaggttattcttgagtagggtttaggaaggtgaatagaagtttgcaagaaggtatatgcaaggaagaatttctaggaacagtatacacacaaaaaatagaatccaagaagtaagttgtgcttgggaaatcacaaagaagtccagtatgactgaaatgtagagctgcaggtggtttgtggtatcaaatgaaatacagaagttgcaagaggtgcaattgtgtagcctttcatgtatgaatcaattcactgcatgtactctattgggctgcagaatgaaaacattagagcctctatttgtatctttttcattttattttcttttttttatattttataatgtacataatatattatggtatggtagtatgtgtactgggagatgtgtacttagttttcttcctttaatgacatgggtgtgtgaattagaagatcactgccatactttccttttaggcaattggactgatagtaccaatgagtcacatggcagtggtgttggggaaagactgccaagaagtgtggccctacagctaatacttagaaagtgtattactaatactatttgcccaagtgattaattgagtttgcttttgaaagtaaatgtttaaataaaccttatagtaagaggtattggaggggttagactcaccacagaggaatgaaagctgaaagattggaagactaaaccatagcatctttggtgcttagtaattaataaattaatgttttctgcttctatttcccactagaccagagtttcttacccttggcactattggcattttgggtgagataattctttgttgtggggattgtcctgtgcattgtaggatatttagcagcatctctggtttctacctactagctgccagtagcactgccagctccccaattgtgacagccaaaaatgattgaaaatagtgccatgtctcttggaaggtaaaatcaaccatgatagaaaaatcactgccctacaatgtggactatagactgcatgaaggtagggccaatgctgcagttatacctcttagtatctctagcacaccagagcttggtagacagtaaacactcactgtaaaacacccacagaaaacactttttttcttgcatgaataggtgaattgtaaaactagataaatatgcaatttaaatcctaagaccatcactccagtgaatttagttgctatttgtgccattgtgtaataatctttctgttttccaatttataggtggatttactgtgaagaccagccagttgaagtttacaaactcttcaaacttagtggcatttccatttcctcatgcagcaattttggaagacttggatgggtctctgtctgggaaaaacagaagtcacattcttgcttctatggaaaccctttcagcttcttgtttggtcaattcaagctttggtcgggttgtccatggcagtgcctgtggaggaggtgttctttttcatcgtatgtctattggtttgtaagtggaattaactatactttttagcttgccgatgggcatgcatctgttattctggctgtcgaggcttatagaagggaaattgttttctagattatttgaagtatttagctctaaagaagtgaaatgggaataattttgacagctgctgaatcatgagtgtatggtagttttaagctgactcaaatggcagctaactagcaatatctttggaccagatctcatagcttgtgacctctcattgacattttgggctaataacttcttcttagaaagacttacagccaacagagagtttgaaatatatttaaattaaaagtattattaaaaaattctaaaaatgtccattctcatttatatacatgtactcttcccaagctctttttaagtgttcaatatgctccagggaagcaattgctgatgcctcctattacttgcaaggttgcttcactccagttcattttccttgttaatttcatgaactattggattcctacaatacatttcctattaatattggagcaaggactccttggttatgctactcaaactaccattaagtcagcagcggggctgtttataatgcataataggattgctcctgccctctttaatttccaggtaatgattgctgaatgtctagggttctgtcttttacttattccaaatgcattgtatatatttagccacacttattttcttcctttgtcttaagtgtcctaactccatgagtattaagtcaagtaattcagtcagacctcattggcctcttacttgaacaagtaaacttcagggagtgagaatcattgtggttaggattgcactaactctgtattttgaatgcatgtggaatcagtgctttggcattctgttttagaagccttagcgatgcactggtagcactgaatagtctggaaatttttcatttttgctttctagacattcattattctacctgacgttaatgagcccaattccagtgagtaaaataataatatgtagggatatatttttatttctaatcattttgattgtgcagagcatgactttttcttcattctcagggatgcagcctgatttttattattttagtgtttttaccaaggatgttttaaatgagtgttttgagagttataaaaattagtgatttatttcttacatgcattttatcaaatgaggaaaatagatttgtgtacttaaaaggaacattatatgcttctataatatttatttctgcgtgttcctgatagtcctttatcatgctttactttgagatctactggtaggctgtctcttggagaggcacttgtcaatgtgatgttagaaggctctgtagtgcctgaaacttgtttgagcatttgctctttgagatctttgggacaggatattaaggtacttgccttggcaggtcatgatcccaccacttggggactgacaaggtcaagaaaaatgtaatactgatactgtgttctaagtagattcaaaagggtctagcaggatgaaaaacttatcctggttttcctggatttttttcttgttttaaaaaggcaaattccatgttctggaaacttcctcagtcatctaggctgattggtcactctactccttagattctatttaaaattttcaggttgactcacaggtctatggacaaatactcaactgaccctaattagtcacctggaagtctcagcgtgcttccagttataaatctcttggccctgatgtgctcacctctaggagaggcaactgaattagatgatctctaaggtcttgctgctcaaaatgttgtccatggaccagcagcagcagcagcaccagggattttttttagaaatgcagactctcagactgggccccagatgtcctgaattacaatgcccaggtgattggtattaaagtctgagaggcactcctctaaggtccttctaattttatctttctatgattctatccctagctatttgtgctcagtggcttgatctttgtcccaaagcattataacctcattaggaacatgtcagagctaatgagcaatttgaattcagcatagatgcaaactttgctgcatttcatggagaaaggattaatttgttgtgctatttgccctggggcaagcaccctaagagttgatttacaaagctctcacagttatgatcttttggggttgcatgttgatggagatctaatatggcataagcaccctgctgtcttcactttcaacccttaactccctccctcagtaagaggtccagagagggcagggagtgaggctttacatagctgcataaacaagacatcctcttcctgttctgctaagaaccaagctcttggagtgtgagttcttccttggtaggccccctctctggtccattttcactataagttatttgtttgacattggcaaccttctgttcctgtccctcactgccttaaatctgacggtgcttacctttgtggcacttcctactttattggttcctatgactcaaagccagcagttgggatgacagaagtatttaaatatttgaagttggccacactatttaatatttgggtgaagaaaaaactgccactctacaaggcagagtctagtttatgttttgttaaaatgacagcatgcttgatctgcgtgagtgctgcttatattgttttctctctcatcagctctgaaaacatgctttctgtagaagccgcaggtattctggatagcgttcctttcccagcttctgtttctaccagcttccccctatgaacctcagtgttcctggtgagacaggggtagtgttagttctgccaatgtaagtcaggacctcatatcagaaacacatgccagtgacagtttttctccagggtcccataattataaaatgtcccacatagttcttggatttatctatcccaaactttaggtaaacattttttttttctgtatagaaataattacacgaaacaagtacaatattatcagtaggattttgtgtgctctttttagatctccctagtccaaattgtgatgtgccgtaagagtgaattacccaccatatagataagacttaatatgaaaaaaagaatgtaaaatatctcaataatttgtttatattgatcatgttgaaataatattttggatagattgggctaaatatattactaaaattaatttaacttgtttattttgagctttttagtgtggctactctaaaactcaacttgccaaaatgggatttatgatttttttctgtagacctgtttctctctgggtgctcagaatcccactgaggcaaatgctggtctaaacctgaaacatggagtcatccttgactcatctttgtaccttatttcccacactaatcacctatcagctcaattttcctccttaataaatcccttttgagtctttctactactctccttccccaaatccttctccagtctgggctaccattacttttcacctgtagaaccacaacagccacttagcttgccatttttcggtgtttcaatctctgaactttctaaatgcagatctgatcttgccatccattcccttgcgtgaaacttttaaagaattctcagtgctttccaaggaaagtctgacattcctaatgtgtcatggagcttccgtgtcctgctgtctgctttgggttccagcattatctctcagcactctgctctacctttcctgcattctgtcccttagccacattcaacttatttgtgctcttcaattcataatgttcagcttccatgaactcagcatagaggtcgttttctctgctaggcttccctgagcatgctgcgcaggttttgatatctctgttgtgtgctagctctttatacttgctctaatcagtacttatagcacctgcatagctttctaaattgtccgtctgtccttataaatggcaaggagggcaaatagggattttctttgtattatgatgccccaaactctgtttaacacatagcaactcaacaaaattggtgttgagtaaaaaaatataaataaaaaatagtggactgcccccagatcttcctttagtgtccttattgtctatttctctcctaggacatgttcatgaggagtccacagcattcggcttttcttcagaagacccaggagtaaaatgctatctccagtcttctaaaattcctaggaatatctagtatttaagaatcttctttcataatcttctctgggcttttactttcctggggcaatcatttgactggaggatttattctaattgctgattccttctctatccaacccctctctacccccattcaatcatcagtttgcctttatttgtaattgttttcttgtcctggtggaataggtacataaaactgtgatagagaggatgtaagctcaacccttataattattttctcgaaaatttttgtcattgttgtttacagcaatgtataacttcttcacttgtcgtagactcattgagatatcaacagatcagaccttgattctgtcttcgaatttttgactgtattgagtgtgagggagattagaagagcttgcaagattttgtaggttggctgaccagtccttctgagtttttacaggacgtacataaaatagtcaagacatatatacagtacatgtttgaaattatttttcagactgaagaatagagaagtaattaacaatcctttgtgggtacaagtcatatcccctctacttcctaggtatatttctttgcacaagttactttaccgctttttgtttcagttctttcatcactaaaatgggtataatggtatttatccctcagggtcattgcttgacatgtagtaggtactctttaaagaatatctattttacatttgtgatttacaaaacaacgcataggcataatactaattgaataggttactgcagaattttttgtttctgagaaacaaatgcctggcaagggaattaggtaatgtaacttaatccaattcctgaaaaatagggaataatttgtaataatcatatgacgttgtactgacccagcaaaacctcccaggtggttgtagaacctcaggtcattcagggcgttgactttgattcatcgtgccccagtaccttctgtttcttccttcccacctctcctggaaaataaaaggttagtgttcttgttgatcaccttgattcttagatcttgcttaatatcctctcctgtagtgcttgcgttcagtttttacctatgtaaccactcttaaggtgtcagtgttcaaagtacgagtcaccccctgcctctgtgaatgcaaaaataaagaagagttcaaatggaaattttggcctaccttttcctctaataatcgcttgactttccttcctagggataaataggcatggcatcactaatggtatcttttcagtccttaaaaaacaaccctgtgagacaagaaaattcaaagatgtattatcttttcttggcagcaaaggttacagaattaaagtagaaaaagatctaaaaatcacaatggaccccaaactgaggaatatcatcaacaatattacatggttattaagttttatgaataataaaaggttgcagtggtatgctggtaaatgtttaacaactagctctccagaataaaaagctctggtttatttcatttgcctaattctatagtgaaaatactctcacatgccttattttaagcttccaacctaaaagcactgaacatatagttgggaagaagggtcaatgatgggcttctgccagccagtgtcagtcatccccatcacagctctggtatgcatatatatgggaggacaagcttcttagtctaacttcctacctgctggataaaatatttttcaatatccctgacaagcagttgtccacctgtctaccttctggttgcatagcttcaataacagtgttctcgtgttctcaaatagccattccaattggactcagcagatcaaaagtagagatgcaatggtatatggtcacctaaagtaggataatggacatctattgcttttcttcatatattaagatagaatgggcaaaaagtattgtcctaatataacagcagataactatgttgcaaaaactgtagatacttccttagaggagaaatatttaagtgtttctgaatccataaggctgtggatggaaaaacttaatgatacaatgataatgaaatattacggaatggtggcaggtgttagcagatagaatagtggtgctgtgacaaggattgttatgagcatggtgtatttttaaaggatgctcatgcaaaaccatgccacagaaatttgttggctgtgcccacagttttgatttttcttcccctttgtgcagtaaaagatgagagtgacatcaacaagcacaaatactcagaagatgtttgcaacacaatttgaggttaggtattgtggtgtgtctggcttaggagatggataattacagaggatttatttcacaactgttccaaatcaagagcatttagagctctgtgcaatgcttgtctttaatacacagatatggaccctcaggaaaagtaagctaatggtaaacaaaaaccagggagttaatatctgctctcattggtattattgattgcctaacaaatcctttgtgggattcaacagttctttacagtacatgggcactaagttacataactctttaagtaactagtatggtaaattggtactttgaccaggaagttttaccaagtgatagtgttatatttctaatggaacatttccctgaattaaaaacaggtttgggccaggcatggtggctcacgcctgtaatctcagcactttgggaggctgaggcgggtggatcacctgaggtcaggagttcgagaccagcctggccaacatggtgaaaccccatctgtactaaaaatataaaaaattagctgggtgtggtggtgggtgcctgtaatcccagctactcaggagtctgaggcaggagaattgcttgaacctgagaggcagaggttgcagtgagccgagatcatgccactgtgctccagcctgggcaacaagagtgaaactccatctcaaataataataataataaaataaaaaataaaataaaaaagaacaaacattaagacagcccacagaaaagaaaaacaacatgtaaggcttatagcccttttgtctttttgatcatagacaggaggagctgttgctgatgcagaggtaagggttaacatttaaaatggactggttgcctcctgatttcttgcacataaagccatgagaagttcagggagagacttcttcccctagtaatgaagctctctactgctaatggcccatgcagactcccttggctcctccaaattagaaatacttttgtgctcctttgcttcattaacagtaaagagtgggagattggtggctatttagggcatggggaaattggtggctatttagggcaagtgaaaattgtagtaattattgttggtaagttctcttcatggtgttttttggactcttgatgttcttttggtgcttttcagaagacccctccatggtcaattctggcatttggcctaggaggacaggagatgacctgactgaatttttggcccctggtgatggtcagtacaagccatcttgcctgatgggagatgggtcttttgctttttgagttgcttttcagagtggaaagcatatctgaatgcttaccatatgaccctctctcctatcagctgtgataaaagtgtagtatatatgataacctccttctctacctgtattgcactacagaaagctggtgctgcacatgagtgcctatgaaattgcatccctaataaaccttggttgagatgggtgaggggagcttgatagactcaaggctctgagagaatgagcagtgcatgaaggagaaataagaaagtaatttaggatcacagtgtgctatggtatgtctctggttggccaaggagtttgcatcagattattggattctgactagaaggagaagaacctcaaaaggaaggtgcaatgtttccaaagacaaatagaaccaaattattgctagcatttagcagtttgacactatttgaagagggaccacatttgtatgggccttcagaaactggggagattatctgaaaaatgcttccttcaataattgaaattgtaatctacagaaactgagtcaggggaaataacatcctaaaaattggtctgtaaatgtggtgttaattgaaatttgacgagcaattaagtccagttaaggtgaccaggggaattcttgggaccacattgctggaattaaaaaatatttctggaaatatctacccaattgattatactatcacatattgaggtaattttttttttttttttttgggacggaatctcgctctgttgcccaggctggagtgcagtggcgcgatttctgctcactacaggctctgcctcccaggttcacgccattctcctgcctcagcctcccgagtagctgggactacaggcgcatgctgccacgcccagctaattttttgtatttttagtacagacggggtttcaccgtgttagccaggatggtctcgatctcctgatctcatgatccacccgcctcggcgtcccaaagtgctgggattacaggcataagccaccgctcccggccgaggtaattttttttaatgatcaacgtggtatgcatgagaagataggtgaggcaggaggaattaaatgtgaacagatggatgcttttgaacagagatcttcttttggtttgtagttaaaactatttttaaaaagtggtttaattgacagcacttgactaggattgcagaaatatgagttttcaaggaaatcatagcattttcctagaccagagaccattattagtgcacattgcttgtgtgtgcctaggagaggttttctgaccactgactatgtttgtcctcttggcaaatatcctactgatatggggttgattgtatcaagctctaataacttaggatcacccaactgctgatttcttttgaaaataagtttgcaggaaatctcttgaccctcatgtgatttttctaggtagacttccaagttggggagaaatgttactgcataaccagctggagtgttctgatgcatataacacttgtttattcagtcagaaaatatttgttaaactcccactatatgaaaggcacttttatttcttatggtcaatcattaactaaaaattctgatttatcaattagtctctcttggatttaggtcttgtgatttaaataaatcacaagatttatttaaataaatccaagcccatatgtctcagtaaaaactggaaggatatacttttggaacctgaaacacttataatcattccctgtacttgaggaaatttagatatttctagtgtgttttatttactgaccacagtacctactgtagccaattttgacatttcttagttcgaacttacctcttatcatgtttgttttacacttatgtccccaaagcttatttttatttgctaaatatagttgggccaaattgttcctggaaaatatcctgggattatgggactcatggtttccatcaggggaagagagagccatgatgactgagcgcaaatggctagaaattctaagaagggaaatttaacattctaaagcttttctaaagattacaatttaaaactaaatcccatatatggaatgttttctattcgaagatgtaaacaccccataactgaaagaaggggagggatgaaatatggtgggaattcctgcactgaattggaaattagaacagatgatctttgtgttcattctgattctaagaatataggttgagaattgtccattagttccaatttaaatcctgaaggggtgggtggggaagggtggacaacaaacctaagtatctaaaacccaaagaaaggaagacattttcccctcctcacaagatttctaaaggttcagttaatgctgcatagggaaatctgaaaaaagaatagttctttcattcccaaatgccctgagcatttttcatccctttcatttcattagttcatggatgaaacaaatacatttaatcttgcaagaaatatgtgtcaagtgctacattgccagggtcaatgatctgtaccatggaagggtttttggtatgtttttaaatgaccgaatatcctgaataaacctctaggcattcaaataagtagtgcagaatggtaaatctggcatatttgaggttcttaaatgagacctaagtagatgttattggccttggtgagtgctttatgtagattatctttatgtttcatagtacctatatgagatctattctattgttgcctccattttaaaaagaaatgaatctaaaggttaaataggtgctgaaatttgcccaggtttacacacctactgagtgccaatctagatttcagttgttacccatttgttccagtgcccaagtgtgcaacacttaaaaaagttcctttttgaattattccacgggcttataaattggctttagatatactcatgccccatctcactgtgaaaacccaatgtcctcttttgactcatttcccttactttgagaatttaattatctgcctgcggcaaaatgccacagttaaagattctcatgaaaactaaaccaaaggaggaagaacagtcataatgtgtattgattttttttttttttggattttgctttatttctttaggtccactttcactctcttttaggggtctaatcattggctaaatctacttatgctttaatgaagtcttaaaaatcattttctgggatggctgtatagaataagttgggtaactggattcacaaatttcgagttctactttgtgatactcacatattgcttttgctctaccctgcctcagtctcctcatttggtaaaatgcagttcttctgaacgtttttatacgttctatatatagaactttatatacattagaaaatgtcactggctgcttttggaagatctcatctatgcattgttcattcatataacaaacatgatttgggtgccactgtgtgctgggccctgtgccagggcagaggataccaataagaaaggggaaaacacctctaacttagggatcttataatctatgtttttaaaaaggcaaagccaagaacacataggtactgtaatagcagtgagtactaggcattacacaagactgcaggagaggagcaggttacctcatcattctagagaaggatgctgaagccactcctgctgggcattttgagcaggacttctgagagtctcagcacctaggcatgtcaggtcccaggcctctgtcaattgttcctcatgtgaatatccaattaccaataataatgttttttgctgttgataaatctggtccaaggcaaaattctggccatagacatttctttgttaaaatcatagtatatagtcttggttcatacaaaatcattaatgtgacatttattagtggtggaggttgcagtgagctgagactgcgcattgcactccagcatgggcaacaagagcgaaactccgtctcaaggagaaaaacaaaaaacaaacaaaataaaaaacctgagagtcaccacctccagttcaccaggacattgtaatttgcaaatgatccaatggcaacttcccactgggttgttttcactcacacagtgactgctaaaacctccctagacatacaactaaagagggcctaagacatatgtggagagaatggaaagatgattgcaattgatgaaagaggaatgtattggattcagaatgagcaaataatctctcaacccattttttttccttttaaaatcaccttagagcgaatactcctgaagtttcttatgatttaaccatgactgacagcagaaataaaacaaccactgtcaattatgtacgtgatacattgtctaaccctcgtggctggatggctctgctcttggaccaagagacctactcattgcaatctgagaacctttggatcaacagatctctgcaggtaacccaaggaatccattagttggtatgctgcattctcatttgttcttatctttctttgtttgagataatgggttgaaagaggagcaggttatctcgttattgaaagtcttggcatattctgatgcagataaagaaaacttcaatagtattttggccagatgaatataagctaaatatgagatttggttgctttttaaacttgaaaattttagaatctatttatgtgttattgtgaatgcagaatggttacgcctgaaaatttaaatttattaatacaatgagaaacaacctctacacatcttatagcattgcatttctttaaaacttattggtcaatagccaatttaccctagagagaagtgtttgtagccagagaaaatgccttaccaaagcatttatacattgcatactgccaccttgtggtcaaagattaacttgccaatcgaagtctgtatgagtccccaggctggattgggttaagggagacaaataagagcagtgaagatagaaatggccgtgtggcaagatggcttactagaaacagagacgttcggaggctaccatcgaaaaaacaaaacaaaaacataataagcatgtgaagccttcatcggcaaccaaggtatccaggttctcttatcaaaattgactagaaggctggcgtgacccacggagagaaggaagagcagtgtggtgcggtggcccacctgagagccacacggggaaaaggaactccgttccccacagccaagggaggcggtgagtgagccgctacccagccggggaaactgctttttccacggaattgtgcaacccatgggtcggaagatcccactcgcgaacccacaccaccacccgggcctagagccctaagcagattcttacagcctctcagctggaatctgcttaagcctaccaaactcccgcggggaggggcgaccagcactggctgcagctgcctgctgtctaagccatttgagctcccagtttggagctcaggagaggcagcagccagcactgggacttgcaactgcctaacatgctaagctctgtggatgggggaaaggcagcacccatttctatagctctaggctgcgttttttccctgttggagccagggaggctggatggctttgtcccaagacttgtccccacagcccaacataccagctgtggctgtctgcagccagagtgcctctttgggcctaactctgacccatccttcctcagtgggcaggcagggcttccccgcaggatctccaataactccagccagaggctccgggacagaattcatatctccctgggtctgagccccagggggagtgggtagctgcagtctccgtggaccagcagacttggcctgtcctcctgatagttctgaggaatcccggcagcccagacgagtgggtttccccccagtgaaacacaccctctccaccaagggacaaagtgctttgttgaacgggtcctgctcctcatgccaccaaactgggtgagatcctccaacagaggttgtcagacaccctatacaggagcgatcctactggcatcaggttggtgcccctcgaggtcagaggtcccagaaggaacagacacccatctttgctgcactcctgtctccttgagtgacatctccaggcatgggagcaaatcagatgaatagggcctgaagtgaacccccagcaaactgcagcagcccaacagaagagggacccgaaagaaaaacaaacaagcagaaagcgacaacaacagcatcaacaacaacaaaaacaacaaaaaggcccccacaaaaatcctatccaagggtcaacagcctcaaagaccaaaactagacaagctcaaaaggatgaaaaagaatcaacgagaaaatgctgaaaaccaaaaaggccagagtgcctcttctcctccaaatgatcacaacatttctccatcaagggcacagaactggatggaggatcaaatggatgaattgagagacgtaggcttcagaagatgggtaataaaaaactacaatgagtgaaaggagcatgctctaacctaatgcaaagaggctaagaaccttgataaaaagttagaggaattgctaactagaatatccagtttagagaggaatataaacgacctgatggagccaaaaaacacagcatgagaattttgtgaagcacacacaagtatcaacagccgaattgaccaagtaaaagaaaggatatcagagtttgaagaccacctcactgaaataagacatgcacacaagaaaaaagaatgtaaaggaatgaacaaggtctccaagaaatatgggatttcataaaaagactgaacctatgattgattggagtaccagaaggagacagggagaatggaaaaaagctggaaaacacacttcaggatattattcaggagaagttccccaacctagcaagacaggccaacatgcaaattcaggaaatgcagagaacaccattaagacactctatgagaagaccaaccccaactccatgagaagaccaacatataattatcagattgtccaaggtcaaaatgaaggaaaaactgttaaaggcagccagagataaaggccaggtcacctacaaagggaagcccatcagactaacagcagacttctcaggagaaactctataagccagtggagattggaagccaatattcaacattcttaaagaaaagaattttcaacccagaatttcatatccagccaaactaagtttcataagcaaaagaaaaataaaatcttttccagataagcaaatcctgagggatttcgttaccaccagacctgccctgcaagagctgaaagaagcactaaatatggaaaggaaaaaccggtaccagccactataaaaacacaccaaaatataaagaccaatgacactacaaagaaactgcattgactagtgtgcaaaataactaaattatatcaagatgacaggatcaaattcacacataacaatactaaccttaaatgtaaatgggctaaatgccccaattaaaagacacagattggcaaattggataaggagtcaggcacccatcagtgtgctgtattcaggagacccatcttatgtgcaaagacacacacaggctcaaaataaagggatggaggaaaacttaccaagcaaatggaaagaaaaaaaaaaaaacagggtttgcaatcctagtctctgataaaacaaactttaaaccaacaatgatcaaaaaagacaaagaagggtattacataatggtaaagggaacaatgcaacaagaaaagaaacgctaactatctaaatatacatgcccccaatacaggagcacccagattgataaaacaagttcttagagacctacaaagagacttagactcccacacaataatagtgggagactttaataccccactgtcagtattagacagatcaatgagacagaaaattaacaaggatatgcaggacttgaactcagctctggatcgagtggacctagtagacgtctgcagaactctctatcccaaatcaacagaatatacattcttctcagagccacatggcacttaatctaaaatcgaccacataattggaagtaaaacactcctcagcaaatgcaaaataactgaaataataacaaacagtctctcagaccacagtacaatcaaattataactcaggattaagaaactcactcaaaaccacaaaatttcatggaaattgaacaatctgctcctgaatgactcctgggtaaataatgaaattaagacagaaagaagttctttgaaaccaatcagaacaaagagaaaatgtatcagaatctctgggacacagctaaagtagtgttaagagggaaatttatagcactaaatgcccacatcagaaagctagaaagatctcaaatcgataccctaacatcacaattaaaagagctagagagtcaagagcaaacaaatccaaaagccagcagaagacaagaaataactaagatcggagaagaattgaaggagttatagacacaaaaaaccctccaaaaaaatcaacgaatccaggagctggttttttgaaaaaattaacaaaatagatagaccgctagctagattaacaaagaagagaaaagagtcaaatagaaacaataaaaaatgataaaagggatatcaccactgaccccacagaaatacaaactaccatcagagaatactataaacatgtctatgcaaataaactagaaaatctaggagaaatggataaattcctggatgcatacaccctaccaagactaatccaggaagaagctgaatccctaaatagaccaataacaagccttgaaattgaggcagtaattaatagcctaattaatagcctacaaccaaaaaaagcccaggactagatggattcacagctgaattctaccagaggtacaaagaggaactggtaccattccttctgaaactattccaaacaattgaaaaggagggactcctccttaactcattttatgaagccagcatcattctgataccaaaactgggaagagacacaatgaaaaaagaaaatttcaggccaatatccctgatgaacatcaatgtgaaaatcctcaataaaatactggcaaaccaaatccagcaacacatcaaaaaacttatccaccattatcaagtcggcttcatccctgggatgcaaggctggttcaacatacacaaatcaataaacataatccgtcacataaacagaaccaaagacaaaaaccacttgatttttttcaatagatgcagaaagggcctttgataaaattcaacatcccttcatgttaaaagctctcagtaagctaggtattgatggaacatatctcaaaataataacagctatttatgaccaacccacaacaaatgtcatattgaatgggccaaagctagaagcattccctttgaaaaccagcacaagacaaggatgccctgtctcaccagtcttattcaacatagtattggaagttctggccgggtaatcaggcaagagaaagaaataaagggcattgaaataggaagagaggaagtcaagttgtctctctttgcagatgacatgattttatacttagaaaaccccatcatctcagtcaaaaaatttcttgaactgataagcaacttcagcttcaaagtctcaggatacaaaatgaatgttcaaaaatcacaagcattcctttacaccaacaataggcaagcagagagccaaatcatgaatgaactcctattcacaattgctacaaagagaataaaatacctacgtatacagctaacaagcagtgcgaaggacctcttcaaggagaactacaaaccactgctcaaggaaataagagaggacacaaacaaatggaaagacattccacgctcatggataggaagaatcaatgtcgtgaaaatggctatactgcccaaagtaatttatagattcaatgctattcccatcaaactaccactgacattcttcacagaattagaaaaaaacattttaaatttcacatggaatcgaagaagaccctgtatagccaagacaatcctaagcaaaagaacaaagctggaggcatcacactacctgacttcaaagtatactgcaagtctacagtaaccaaaacagcatggtactggtaccaaaacagacatatagaccgatggagcagaacagagacttcagaaataacaccacacatttacaaccatcagatcgttgacaaacctcataaaaacaagcaatggggaaaggatctcttattcagtaaatggtgctgggaaaactgggtagccatatgcagaaaactgaaactgaacctcttccttacacgttatacaaaaattaactcaagatggattaaagacttacatgaaaaactcaaaaccataaaaaccctagaagaaaacctaggcaataccatccaggacataggcataggcaaagacttcatgacgaaaatgccaaaagcaattgcaacaaaagcaaaaattgacaaatgggatctaattaaactaaagagcttctgcacagcaaaagaaactatcatcagagtgaacaagcaacctacagaatgggagaatatttctgcaatctacccatctgacagaagtctaatatccagaatttacaaggaacttaaacatatttacaagaaaaagacaaacaaccccatcaaaaagtgggcaaaggatatgaacagacatttctcaaaagaagacatttacgcggccaacaaacatgaaaaaaagctcaacatcattgatcatcagagaaatgcacatcaaaaccgctatgagataccatctcatgccagtcagaatggcaattattaaaaagtcaggaaacaatgaaagctggtgaggctgtggagaaacaggaacgcttttacactgttggtgggaatgtaaattagttcaaccattgtggaagacagtatggcaattcctcaaggacctagaaccagaaataccatttgacccagcaatcccattgcagggtatgtacccaaaggattataaattattctactgtaaagacacatgcacatgtatgtttattgccacactatttacaatagcaaagacatggaaaatgcccatcaatgatagactggataaagaaaatgtggtacatacacatcatggaatactatgcagccataaaaaggaatgagatcatgtccttttcagggacatggatgaagctagaagccatcatcgttagcaaactaacacaggaatagaaaaccaaacactgcatgttctcactcataagtgggagttgaacattgagaacacatggacatggagaggggaacaacactcaccagggcctgtttgggggtaggaggtgaggggagggaacttagaggatgggtcaataggtgcagcaaaccaccatggcacacgtatacctgtgtaacaaacctgcacgttctgcacctgtatcctgtttttttttttttcagaagaaataaaaaaaaaaactaaaaaaaaaaaaatggccatgaggaaagtgggtacatttttccatatttttaaacagcaatccagtggaattccctaagcttattttcatacttttaacacatatatttcttcctatcttatcatacacattcttgctaacagtcctgagagcctatcttagggagacagaagccctgccatggtcatgaggaattcagaacagaatcacttttgatcttctctccatggctttcagaaaggatgtacgcctctcttttcttgccttgagattcccgtgagagcactctggagaattttcatgcagtgaaaacagtagggtgtgcctctggaggtggataccctaggtttatgtcctgacactgcactcttctgctttgtgatatggggcaagctactgaacctctgcctgcctcagtttcctcaatgtaaaaatgggacagtaagagtaacaatgacaggggtgcctttcgaggactgaatagtgctgattgcatagtaaatgctcccacaatgttagctattactgtgataaatggatgacatgcctatcattgcctgtcgcttcaagtcgtgggaaaagctggaaaggaattctagacctggccttgtctcttctagctgtttgacctgagacgtgtcaattcatatgtctgggccttggctttctcctctggtaattgagattgttaaacgagatgaaccttatggcatctttcagtcttcatagtctgattttgtagctctagttatgaattttttatgaagtagatttaagtattcccatttcccacaagaaaagtacaatctgggtctaaattgtatgatttctaaactactccatctgcgttctctgtagttgttttggcagggtggtgtggtggagtaggtggaatgatggggttccttactaaatgagcactattgtgtttttctttcacttcaagtactcagcaacctttgacaactttgctcctggtaattacctactgctggtgcacacagatttgccgccttaccctgacatcctcctaagatgtgggagtcgagtgggtctgtcttttccatttcttccatcaccaggtcagaaccaaggctgtgactggttcttcaatagccagctgaggcaactcacctatctgggtaagtatccaattggatgaatgttttgagagcacatagtcagaaatcaccaatcacccttcaattccagacatttgtgctgtgaagtgctgaggaactgaaagggacagctgtgtgttatggttgagtgaatgttccctgaagtctgattgcctgggtttaaatcccagctccaacactcaccagctagcatacacagagcctctctaaggctcagcctcctcctctatagagaagtatgaccatagggcctacctcaaaggataggaaattaaataaagaataacatgtaaaactcttgagcagaaggcctagcccacaaaaaatgcttactagacattggtagttagtactaataatatctttaattcatcttagggcagtgtcatatttgtttgtagtggaacaactgcacatgtaaagatggatggctgtgctttagtctaggagtttgagaccagccagggcagcaaagtgagaccccatctctccaaaaaaaaaaaaaaaaaaaaaatgctgggcatggtggcatgtgcctgtggtcccagctacttggaaggctaaggtgggaggatcagttgaggccaggagtttgatatcagcctagacaacagagtgagacctaatctctacaaaaaattaaataaattagctgggtgtggtggcgcatgcctgtagtctcagttacttgggaggctgaggtgggaggatagcttgagcccaggaagttgagcctgcagtgagccatgagcatgccactgcacttcaacctgggcaagagattgagaccccatctcaaaaataaaaaaaagaaagagaaaaaaatggatggctgattatgaccattggtatgaggaacagtagagagtccaaggtagagagtaccaatgcagagagaggctgaattaagacggaagtttatgtagaaggtgagaaggaaaacttctgatgagaatctgaggtcaggaagatgagtagcatggagggctgatatgagcactaggggtgggctgtgtctgttttacgtcaagattaacatgaggttgaagtaatcaggaaccctactgtgactgcagagtcacagaggccaaaggtttttccttatcttcttactgtgcatgtttctcaggataccagtgtgtcaggaccatccacttcttttgatttcctggagtttatttcatattccttttctataccatgtcagcattggtctctctgagcaccatggtacctgcttgttccaatcgcagctcactgtgaggccacttcttacagtaaaaaggagaatctggctaaataggtctcaagagtgacaattttgttataaattgctcttagtagatcctggtcaaatccaggggatcttattagcataacaagttctagcccctgccacaagcccaaggtggccatggatttagagggcgaggcaatggtcctgagtccaccctttgcctctttcacttgtgcctaaccataagtccagtgagtcggacctacaggctagccccagaactgttaaattttaatagcatcagagagagagtctggtgctcccttggtctttttttatgtctttgccaaaaggattgtcgtatattttatttgcactgaattataccattcaaattttatttctgatttgatccattcataaatgtaacctaaaactataaaaacttgagacggacagagattcctgagattgttttaccacttcagccgaatacagccataaataagagtaaatagttaccattaactttatggctattcacttgatatgtattctggaacaaaattttaatctgaattgctctctttccattacttagcctgcttctgaagaggctgtcttgtccataggtcatattctgttcatgaactgcaaaataatctgaatactcaaataaactaaacgtaataaaaaccatttatggtacaaagaaaaaaaattaaatcatgcagctatagattttcttcccttatgatagcattattaattgaattaatagcaagttatactattatatatacacatatggtataaatgcacatctgtgtaagtagctgtgtgaatgtgcatgtgtgcttatatgtagaggtacatctgtatctgtgcatatgtatgatataaatgaatgtcttagtataaaacacttctattaggtagatagcctttattaatttttaaaaattatttgtattggaataccctagtatctcctcctttgaatatgagttggaaaaggaataagaagtcacagaggatttgttgaatgtttaacaaacttggagactcttgcttcttgaagggattccccgtaggatcttttatggtcattggtgcctcctttatcctctgagtgtatggagtggatagctggctagagccacttctgttctcatttctgggctgtcacagtgatggtatgaggactcagcaggaactgaggctcaccctgctcctccatggcagtgcgccatgtagctatactgggttgtgtaaatttagctgtaattttggatatcatctgtgtaaagtttataagatctttagcaaggtggtgattaggcttccacgttttccatatacctgactgcatttcccaatgccataatggtagttgctgttgttggtacccgagcaagagcccaagaagtagagttccagttctgtgccatgcattttatatattgattagattgtaactttcacttaactgtttttttcagaccacttgactttataggaccatgactgggataatttacataaaatacatttaatctatgcagatggtgtaagtcaagaccacatagtctatgtggacatattcctgggatgaaaaacatgggaaatgtgtgtatacagaaatttattttattgtagggaagctgcttgatctctatcatggccacggaattccatattagatttttttgggggtgtggctccttttcttggctggcatttccttcagagtgctgcttcactgacaactggctgaattttcattcactggttgaccacttctaagtgggccatcttttgtattgttttaccacttcccccaggataggaagttttagaaaaatcacaattatcttcatttcctctgtttggctgctgcatgtgtgatttaagatacctgactcatcttcaacccagctgagtggaaaaaacctgaacccaggcattctagctcctggctgtggctctctccactagagtgtgctgcccactaaataattgtggatcactgaccagaaaggatggcgggggtgctaggcagggttgtgggagaacccttctcaaggattcccagtgacaaagaaaaaaatcatacgcatacaatatgttttgacccttgcatttttcttttctaccaaggcaagttttgcctttgctcagcaaacatcttcacggagtgcagtttttttggaaagctcatggccagtgcttggggcttagggttttaatcagtggctggctggttattttacctggggcattgcattataattgctccatgcctcagtggctttgtttacacagcaaggttaagaaaatacttacttgtctcttggaattgtggcacaaaacatccaaatatattcaagtgtggttaatgtgccatgttatttcaccaacgttttcctgatagactatttctctagaagttttctttctttttagaagattaacaataccatgtgtcatgagctcagtgtatatgttataacctttctgaaagggtctccctctattttcttttactagatttttgtgagataaatgggattcaccataatatgacatatatgatatattgttcccgtgattgaaatgtgatgccacttaagcaattgttagccacagaataagataacctcactcatttaaaaagatctgttagggagattggttcatgttgcctttctaaagctgctgagaattttgcccaaggagctacttatgaaacagaccacaagtgaagaaccttgtgtgcactattgtttgtgttaggatgctgcaggagcaatatttgatgtgataaacaattatgaatacgatgaactattatcgtgtatcccaactgtagcttctatgccgtgcttgggaatgggtatgactgtagaacaagtgttcttttatatttgcaaagttgggagaaaaatccagcaagcccatttttcccttcatgcgatttgatgccctgactgctcatgtctttgccttacagagccagtttcccactgcctctttccctgctgtttttttccaaggatgtttcagttcatggtgaactatttttattttttagttacattaacgctatgaaataattagtcagctaattaatctggtttacaagctttgtaggattcttcagctgtcagtcaggcccaggcctgaggcctacatcgagtctcagctctcttgcccatgtgattcctgttgccatggctactggctacatctgctgacaccccactctctatttattgcttaattaagaatttcacgctcagcctttatctgcctctaagaacaagcgcacactgttaagaaattccaaatttaggcccaggcacaaggaaagcctttcttatgggcttggctgtatggagcctctctaacgatcctctcggcatcccagccgccacccttcaatcaaaaatcattaaatggggcagagataatgagcatgtagcatatcaaaagaaggatgtttgcttggtccaaaggaggaaaagctgcttggccccacgctcagctccacttcaaagggagatgagacctctcaacactggggcctgataatgcctcatttgttcttggcttgacttatgcaaaaggtctggtatgtcagagtccagtctcacagacgtgggtttcccccacctcttgcctccacctccaccagccccctccctggccttctgcacactcctgtgtcagcacttaggcagctgggtcccccaaagcatcagagggagcgtataatcactgactttccactcacaatggccacttgtaggggggtggccaggaggaggtcttcatcacaataggaacacaattattgcagctgctagggagggctatgcttcttcctgtagaaatagaataggacttgcccaaaacaggaggagaagattggagggaggcggggggaggttgagaagggtggagaaaacaatcttgagttgattattcataatctgactcttggaagcccgatgcagagtcagtggggttccagcagctgctcgcacacagccttcttctaataattgtacattctgtcaggggtcaacttacttttgaccctgtccttttatattggtaaaaggctctttagggcaaactgttgggttgtggcagggtgcattaaacacagccccttcccctagcttgatccccctcccgaccagcagccggtgataaattcatatcagatgctgtgccattcacagttgccctcccgagttcacacagcccccactcatggagcagagatgcagccgagctgggacattgtgtgaggcggcagctgagaaggtctgcctgtaaggctgaggctcctgctgcaccaccaccttctgatctgactgagaaaaaaaggacatgtctagccaggctggccaacacttgtgtccaaatgtccgcctcaccacgaataaagggcaagagggctgtgcatggaaaggcagatggactttattgtgtgtgccaagttgcctagaagaactcaggtctgtctcatcacaaagatgggtcagaaaagatgctgttaatttgggagagcctaaaaaatcaggagtgctttcctgggttggagcctaggctcctgatcctgtctaccactgcccaggtttcctttcctcaatgcaacaagggccctggagccaagcaggctgcttgcataaatcttctcttcttcagctggcctagaagactgcctgcaaatcctggaaaataattcctttaggatctaaggaggagagtggcgtcagctggctcctgtgacctcttggggaagattttgtaggcagagcggaatcagaatctttttgcaactctgcagccattcccatgctgagcccctctaaggcaatccacagcattctagttaataaattaatttacattcttatgaaaaactcattcccaaagatccccaaggatttttaccagtatgtagagaattgacttcagggaactgcactaacctttatggcaaaaatatagataacagaacagaggctggggatgtgaaaagggattttgcctcttggttggaaacaactccaaaaggaaaaggcaggaagagaaggagaaaaggaaggaaaggagaggagaggagagaagaggagaggaggagaaaggaaagggaaggaaacttagaatcaaatacatcttttaggaatcactcaggttaaggagttaatgctccgcaatgctgagttgctagccttaattcacacaggtcataggtggtgcaaccagtattcaaatagcttttctgactctaggttcagtgctttttctagtataccatcttttctttttttaaatctgagcttatatacctaaccttttaaaccaactcttcttctttcaatttataagaaaaaacaatacttagttaacactgtgcttcctgaactttagatattttagtaccattttcataattgtgtcatatccttatacctcttgtctgattatttacttaatatttttcttaaatcaatttctacactgtcttatttttaaaacctaacttttcttaataatatccatgaaatcatgggtttaatgggttagttgtttttttctaaaatactttacaatgtatagatactaaaatgaaactttttatgcctctaaagtaaccattgtgcatttaacatcttgggaatatgatttggtctgtaagggtttggtataattgataaaaagtacgaattgtgaagtaaggatcttttccatctgggtctcgctctttacttggtaagaacacctgctcctgagaacaaacaatattttaagagtgtagtatgagaaaatttgtttagttccttacatttgtgtttttttgcctcctgtgtaaacagctgaaatgcttattcccaggaccctcctgagagattcaggctgtgtaggtctgtggcagggtctgggaaatcacaaatacctccacagaagtatgaaaaacattgctctgagtcagaataacaattgttattcttctctgagttaattaagaaggtttaattgagctaactttcaggattgtggctaatgcagatatatgtgttggtgtcttgatcaagttcttttccttttgtcccccccaaaattcactgtttcataagtgaatgatacagggataatagaagactcaaaggtaatcacaggattttcatatactatttctgtgaacgcctttaaaggatcatgttttatgagggccaagatgccttccgtggctgcctctgaggctggaatcagacaggagtgtggtcctgtaaatcaagctttagctgccaaggactaactgacaagcaagccttctctgtggctaagccaaagaggtcagcttctgaggaatgaggtcaaattcactgagcaggacaggaggaatagaaggagtgtacagatttgtgagtcaggacagggaaaagatgtggaggcaacagaggaggtaacagagaggttgtggaggtaagaggtaaaaatgcagagagagccaacagccagcacaagaagacagagctggggcttgggtccagggcaggcagagacggaaagagaagtcatgagtcagggtgggactgcatgacatttgcagacactgattgcagttgctgttttatgttctttcactgtttagtcagtggctgacacactagataaatgtggcctgagtgagaggtcctaatatgtgcataaactaaaacgacaaagtgagaatgagaatatgaatgaaagagtgaaatagggaaggagtctataacctactaagattccatgtgttttttatttttaaataaatgggtgcttatttctccctctaaaatttcaagagagaattagacctggttagggagagaattaattaatttttctgtttcctagagccttaagtgaggatagagttcttcagacacaacacattaacctggtaggacctcgtatcacatctactttagtaactctcttttctcttaccaggagccattttcttagcacatttcctcttcaccctagatgtctgtgtttatagcaagtttagatcacatagcactcgtcagaaaaagttggcaataattggcccaaagactttttttttgtctttttgagcatcagatcttcttacaatctgggaaggatcaactacaatggggctccatttataaacacggaagattaaccattctcatattacaaatacaaaatcagaaatcataagcactgagaaaacatatgtacaatatcacagcttgtgtaaggcttttaaactcttcccaagtcaataccttcattctcaaatgattttcatccctctttgtatttattcaaattggaaatgacacttcacatttacagttctttgtagagtcaacacacttaacaaactttagcagatctggttaagttgcttacaactctgtaatactacagctcatcatgattagatacagctgtaaaaagagtagaaagtaaaagcatgtttcttgaaccttgttgactggcacctggaatcatgaacatgccataatgacagtattgataatagttaacatttattgttcatgatgtgccaggcactgtgctaagcatgttccatggactattctatcttttctttctaatagccatatgagatagatagtatgattattcccacttttagatgaaatgaataaggtttagaaatggcaaataacttgtcagtggcccatgtctaggaaccagaagagccaggattcagattcaggctgttgggctccagcacccacattcttcccaccattcactattgtcatgaccatgaccaggaaatggtgtttgggaagagatagccctctgtctcatactcatctgcccccagatgcatgtagatggtggtataggaaatcagacttctaatttttcctgcttttgttaacttttctgtatctgttctgatcctgaaactacttctcttcactgactggcattcacacactcaacgttaatgaagtgagcaacagattttcaatatattttttagttttgcaatgtctgttttggtagggagttctcctggaggtagggaccatttgtgcgtgtgtagaggtttaagaaaatcattcaccactcagtccagaagccattggtgcagtgtagtggaaagagctacagatacaagattaaacctaggatttctaaattggcccatgaaaatgaagtatctacatttctagcaatatctggtctcataaggtgcatgagaaaaatctctctctcaaaaatttgaagacaaagctaattattgatgaaatcttaaattatcagttggtgcttaataaatatttattaaattgagaacaagtttgggatgaatatcacaggatggatttagaagtactttagaactttagagaatgcacaaatcaacgtgaacagaagtggatgagttagaccttattttaaaaaaaggaaatgacaccttgactggtggctttattattagtattaagttagaaagatgcatgaaataagcaacagggtgaaggaacaatttaagcaaagtcttggaagtggtgataaaggtagaacatgtcaagagcatgttgtcattgtaccaggtctcaacatgtggcagtgtaaggagaaagacacaaactcatgctttacatccttagaaaaattttaaaaagagaaaatgaccaaaataagattagagaaattgaagaggtctcatcatggatctctttggggatcattttctttgtaatattctgaggcttatattttatttttatttttcattttttagttttttcaagacagagtcttgctctgtcacccaggctggagtgcagtggcgtgatcttggctcactgcaacctccacactgcagggttcaagcaattctcctgcctcagcttccctagtagctgggattataggagtgcaccagtacgcatggctagtttttgtgtttttagtagagatgggttttaccatgttggccaggctggtcttgaactcctgacctcaagtgatccacccacctcagcctcccaaagtgctgggattacaggcatgagccacagcgcctggctgcttatgttttatatttagaaagaatgatcctgtgtttatttcatctgatggaggaaagggtttagggttccaggaaaacaaaagtggagaatgtgaatttggccgagtccccaaggctgcagccttcagcaacaaggggtgctccagtggtggaaggtgtggctcatgtgacaaacaataaggcagaaaggtaattaaccaataagagacaaggtgtgactgaaaaatggagtttgtgcacctgattactaattaatcaggcgtgagagcaccttgtagatgcattcactatttaattatagcagcctctcttggcaaaggagcatatgttcccagcttaatctactggtttatcctgacatcaaattgtcattatcagaaagaatcaggccttttgattatttccactaatttattgaacgcttaaaattaatgaaccccaggccttttaaatgtgctcagttggcttggatgataggaggaggatagggggtggggaaaaggcttcattaaaaggacaatttgtttggataaaggtaaccaaatacatttcatggatgatctgaactctattggtgaaaaacacatgaattctaaaagctgagcctacaaaatgatgaagagaaaataggatatgaggtatatgccctgctggacaccattggcttccttagaacatatggctaaaggtttcgtttctgtttttgtttctcctaattatttatgtgccagttctcctggagacctcattgcaattacatttaatcaaatgaaagcaatcaaaatcaaatgttggaaatcaattgttagattaactaacaaggatttcatttttctgttttgaaaatttaggcaactagaatttagcataaattcttcttttctcacgtgtgactgtctttaatattaagatgatctttgtatcacatgcaagttgtggcttttggtatttagtttcaggtgaaggccaagttcaagtcattctccgggtgaaggaaggtatgcccccaactatttcaggtgagtattaacacacgaagtagaagtgtctagtatggcagaatgtcctccagtagttctacaaattccaccttgtcatactgttaataaacaggcaggtatcagtcctaaagcttatatgtctgataactctctattgtgttgccctgtaactaaaatatgtatctgcatgtcaaaaaaggatataaaggtggatttatttttcaaagcaatgaaagtaagaattgaaacatgtaaataagcacatttcataaattatggaccatatgtgcacataggactccagatctgcagatgggctattaggccccctccaaatggaaagaaaaattcagggtatctctaaactttaattgttcctggtaatttcaggaaatcagggtaaacaaaccctcctcaaaagtcagatggttctatgaaatctttctaactcaaaaagccaaattctcaaaaactaaatgtctcctaagcaccttctgatgtatttcattgtttgtttttgtttattctgagtcaatttaactatacatttgcaagaggaataaatcttttcaaacgcagagatttcttttaattttcagtggcatttttgtgctatgtcagagcagagcccatgctaatcagaaaatgatctaattcctctgtttaaattaataggtaaatgaggtaagaggactggactaaaactataaatgataatcctgaaggttactactccatgcttattggactatgaagaatgtgattcaagattgttttcagaatgttttctgagctgccaccacactttgttttttatgttccttgtccttcatctctctttgcctttaggtggttcaaaatgccttgtttattgagtgccttttatgcaaggtgtgggggataccatgatgagcaagatggaatgaactttgactttatggggtcttatgatctcttggggatgtcagtcaaactactaagtaatcaattaatacagttgtttaaaaattactgttataaggaaaaggatagttttctcttctttgaaagtttctatgttcaaattctccaaggagagatttgatttgctgtgtcagtgcctattctgtagaggacacacctgttggggaagctctcatgccaggcccccttctgtggatactggaccatctatgaatggccattcttggttcaaccatctgtagtcagggtggcatgtcactcagcatgtagtatgatgatttctgtactaaggattctctggaaggaacattcagagctttttagaaggggtcagtttaactggagatgcttgcattacaactgtcaattacaactgctgagaaatagaaagcccatacttcatagagttgtgggttttaacaaaggtggagaccttgcaggctatcctatccagttgcctcattttacaaatggggatgtgaagcccagatattaaacttagtcatatcagtagtcagtcatatgagcctagataggaactcagatgtctcaactcagcccagtgttccttgtgctatacaatgtagcctctaatgtgtttaaattgccttattgagcatagattaatttatgagttatattaaaatctagccagttttcctacctcatatagttgggaacagaaaactatttcaaaacacaaagagttacagatttagtacaatatccttcatcaggaggaaattttaaataacatactttcaagacattgcctgattctcatgtatgtagtatctgtgctagtgccaaaatttaaatatggtaatgtattttgtttaatgagtagctctacgtaaaacagtaaaattattgcaatatcgtttttgccaaaactaagaatgaatgaatgaatgagttaacacatctatctgtgttaactcattcattccattgtttgaatgggtcaatccaatgtttgaatgagttaaccatctatctatgtgttaaccgatatgagtatgtaatatgtacccgtactaagtgcacatattgtccatggtcatataagaacatccagatcatcgggtattcttttcctaaattttcccacagacctaagtttttgtcgctttctttgatctctgagaatcaggcagccctagtcttgttcaaagttaactcatcccttcctgcatcttccacactttcccccatcagcgaacaactcattgtctcgtgtagttaacctttctttccttactggcttcttctgttcagtgcctcccatttaaaaacaaaacaaatttgtggatactgaattttcctttagcagacagctgtcctgcaaacttctcaaaagcctagcctcctcttcatgcagagccatgaaaacctgggttgatgaagagcaaaggtgtggaggccaacatttggctcatgtattagacttgagactacctaaaatcttaagtgcttgttgagggacaaatttgtacagggaagcaaggagaggcctcatcaggagtgttggtccagaccaaaattcatgggctccagttttgaaactagtctaatttatctaaagcttcagaagacagatcaaaggctgtggttctcaactcttaagactgtccattcctcagtgagctttttggatggtctgacccaacatctttccttccttacctccagtgcattcctcaatccactgtaatatggtttctgtctcaaccactcaactgggaccactgtcatctggatcacccatgccttgattgctaagtttaacagtgacttctaattctctctcttaccagaactctactattaacaaggtcacttgtgctctctggagatgctgtattacttaggattccaagaccttcctctcttctgattctcccagtagatctctgactgctgcttctttaactcttgtaggcttctttttctctccacaaatttgattgtcaataatagtcatatagaaccctgatattagttgtatagaaatctgataactctgacaggagactgaaacatgttttcttatcccttagtgttcttatcttaagcaggatggtatagaataattaaatttgtacataataacattccttcattagaatagctaccttaaggcctaatttgtccaactaaagactgtgtcagccctcttataagcaagagtaaaggtgaaaaaagtacagaatgtttgtttccatcatctgtgatataaaattggagtaactaaagattcctgaagcttggcgtgaggttttagagaacaatcattgcttgtttgaaatatcactggaaatgaggcatcagagacattttatctggactttgtggggcaagctaggggtcaccctgacaaataccccttactctacccccagctgagtattttgggtctaatgttgggaagcaggcaacattgggaaaaaacttagaaaggtattacagtattggagtttatgaaatatttataaagcctcttactgagtgatgcttattccaagacattgccttattcccaaggtgtgtggtatattttgtactaattaagttgcctatggtttttgcttgaccacaatctatatacttttaggttatcctgggtctctaattaaaccatgactactgaggaattgggtctggtagaaaaaataactaagtgttcctcatgtttctgatatcaggtattttcccttgtcaccttgaaatcctctggagctattacaaccaccctcagagtttcaaatacagcttctaggccgatgatgccaaattcatctctgggctcagagctcttcccatctttccaattcatatttttccactgcttgctgtatagctccatctggagaccacagagataccctgaatgccctatggcacaaactattcatccacttctgtcttaatgtgctggaagtctctggaccctccacctttattatctttcatactctggcctctgtttattttaccaaccttgtcacttacctctcttctagctctgtggttcagcaacaccaaatttcttatcattcctccacttgacttcccaatttttgcctcggctcatgctcatccttctgtctgcagtgcaaccctcttgtcatacactcatcacaacctcccctttacctgaataacttctaaggctttaaaatgcagctgagttactacttccctcgggaagcttctcctggcaaaatcttgcttcctttcgtgatcaggtaccattaaaaagaactcccctcagtgcctgtgtagagtttttatcctcctaatactgatataacactatcagctccttggaggcaagggtgacatgttatttctttttgtatccctactttttaagggcagttctaatagagaaggtgctcactatttatgttgtaaaattagcaaatcatggacatgattccctccctcccctcaaaagaggaggccttttcattctacccttttgagacaatctctcttcccttctaactctgtaccagtaatcacatcccaggaaagaacaagtagatatggttcagcatggtgttgtgcgtgatgtgctattggacagtccccattggaaattattagatttacatttcaattatgcgatgagatactagcagaatggttgaaaagaaaatgccgtttgacgatcaaaggcagaatcaatagaaactggttggaaggtatgatctgtctgtaagttaccaccctgagaagtttttagattattaccccgcctttaatgtgtagggagagctgtgggaagaacatcacctttgactcagtcattccattgaggaatgtatttgaagaagataatcagggttattgagaaatttgcatagagacagttaacactgcattatttacaatttaacagagaatagaaagagtctcaatgtcagacattaggaattaattatggatttttaaaatatgatatgtagccactaaaattatgtttacaaggcatttaaataatattataaaatgcataggaaaataggctaagctaagcaaaagtagaactgggtgtaaaaaataagaacaggatttgatataatctcaattatgtaaaaattctgagaaattctggaaggaaacagaaataaaaggtagttattgcaaggtagtgagattatgggcaattattacctttcttatttgcattttttaaatatttcatgataagcatgccatatttattataaggcaaaacagatgtataataacaaaagtgggatttttttcagaagtgaaggtaatctaaggattgaataattacttgctttttaactgataaatatttgtacagaaacttataaaatattgataggcagcttctttgggaggtgaaaataccactagcatcctaaaataaggatagaatttggaagttatcacaatggattagattttcaaaatttttttttattttctagcttctacctctgcccctgaatcagctttaaaatggtccctccctgaaacatggcaaggtgttgaagaaggctggggaggatacaacaataccattccaggccctggggatgacgttctcattttacccagtgagtaaaactacccaagagatgaatcacagacaggctgaacccagccagatctgattatgtttcatttatattgtacaacacagtaaagagtttggaaataagtaggcacttatgttgtttcattcttcctctttttgggggggttaatgtaggagaacaatttcatagaccagtgaaatccccccaaaattaacctagcatatcttcattaaaagtggaataagtaattgtcatgctgaaaggagttaaaataatccactaactggttaattttcttcatgtgtcagagaatggatttacaggttctagtatccttaagtttgaaagacacagagggtatggaagacaacaatttattaatgcattctgatggtttgcctttgggaattttgaaatacaggactgaggaaaaatgacaagctcttcggttgctatgagttttgaaaattgccgagaagtaggttaataaaatagaaaaatacctatctatgtatctattcatctgtttgtctagacctatcttccagtatacacgttataaaaaagatgattccttagatatacagaaacacacagccatacttataaaatcttcttatttaaaggagagttttcaaaagttccagaatatctccctagcctgagaagaaaatgtttttcataggacaattatattttcccccaaagacctaattacatttatggtttaatttgaacctcttaagataatagtgaataaaagaagatccataatggaagaacatttaaccatctgtgaagtaataataatgataatgtcaaacatttactgagaactaacaatgtgccgggaactgttttccatgtaccaactaatttaatcctcacaataaccttatgaaataagtaatattattatccccacttttacagacagagaaacagaggcccaggacaattaagtcacttgttcagggtcccacggtttgcaatttgcagagtcaaaatttgaacccaagcagtctttcttccagtcctcatcttgaaccaataacgcacattccctttctaaaatgactacgagtaaaataaaggagggtcactgtattgtttgctttatttgtgtggcagaatgaaggaagaatgaaagaagatatactggccaccttcttatcattggtggtgtgtttgtgtaactgtgcccagagacacgagggacaggtgtgagtgggctgaccagtacaaacgtcaattattattatcatcccacttcccagtaaaccacctctctttgatggaggatgtaactttttgaataaacaagctcgtgagtcattcctatatgaaaaggaaaaatctgttctgtctcagccatctctttgatgaatctagccagcggattcaccctgggctatggtttttcccactaagcaagctgcttcccccaccccatgcaggaagcaagagaagcttttgaaggttgccaagcttttagtatcctttggggtttttatgccgagcaaggagcaatcttggccattttgcttggcactgcagttgactgtgtccactgtgtgtcctgggtcccgggatccctggctttctccactattcttcattcctttgtctatggtcagctcataagatcataggatgggcctgaattctccgtgaagctgctcttaaatagcacaaatcaatgctgggtgggggaaaggaggtggggcacaggcattggatgtagaaaggactttccagttggcctttcagtgttattgtgataatcagaaaagttaagaattttaaaacatacacagttatttttcattatttctagccttcacatgaaaagacaggtgagtgaaaaacaggtgtgtaatatataaaaaataaaatccttgctcattgtccctctcctgttgtctaataacccctcttctatctccaaaaaatgatctgtgattgatgagcgattgaattcattgtgccatttggattggggtcttatgcaggagctgcttggccttactcttcccttctgatttttgacaggctgatattttgacctctgatgggtctctggattgaatctacctttgttttctgcttgtggttttgtctctctctgaactctccaccttttcctggctccccttgtttctttcattcctagccttctttaaatcaaataaatttgtccacctgactctggcgcaaagtagacgttcagtaagcatcatttggatgaagtgcatgaactcattgctcccatccataattcaatagcagaaataaatctttgtgtttgacagcattgacacataccactataggattttacagtctgtggaaaaaaatgtcttctcctttgaatagattcctaagaattatgaaatgatttttacgatgatagtaatgatggtgatagtagcaactataacttgagtgcttggtgtgtgacatgcaccatactaagtattttacaaggatttttttttcatataattctcactaccactctataagtggattctgttattatccctgtttttacagatgaaaaatctgggatgcagagagggtaacttgctcaagttttacccagccagtaagtaaagaagctttgcaggaaatcagagaatttaaatcaagagttctaactcttcattgtatctttcttttttcaaaaaaacttaccatcaatacctgctctgatatctccaaattagactatatattatactgaatttatgcccctccacattcttctcttaccatccgcattcttaacttgaaataaaacaaaaataaaataaaaaactattatttgttgagtatctcctgtatgtcagatacactgcttgaggtatttaatcttatcacacatgcttggaaaaactggagatacttcccaaagaggtatgcaatgcaatgaaccattgcattagaaccattctaatgcaatgaaccattagtaaaagcatttgctttgcatctggtagcagatgtagttgtaattcaaatgaacacccctttccagttcagtttagcaaatatttaccaaacattcactctgttcaaggcacagttccaagcgctcatgatctgggaacccaaagtcaagttccatacaactgtgaccagccagggattttgctgggttaataaaacacataatgcacaataatacaacaaatagccataataaatactgaatgtgtttagaatcatagtgtctctagggtaaaggtggcttcatggaagaagaggcatttgaagtgaattttgaaagatgaggtaagaattagaggggcagttatgagacacaagggtatattggggatccttcaggatataggatgagctgtcgactaggataaacctggggttcacatttggcttctgacatttacaacggtgtgacattggacaagctgtaaacctttctgacctttatttataacattagggctataattaatataatgttaagaaagatgaaatgagataacatcagtgcacatgaccaacgcatagagttttggcggtaatggaattacagatgaaagctgtgatttgtaatgtatcaggtgctcttttccttcatttttccatctggctgcccctcttggcctctggtattagcaacactttgtatttgctttccaatggcttattatttaattttcacaacatccttgggagctaaataggtaataactattattacagtaaaaacccatttttacataatacgattttaatggaactgctgattttacaaaatgaaagtgactggtaaaaaagatttaagtgatacttttgaacctctaatataattttatggtgttttgtgtattttaattcattaataaaggaaacgtgtagaacattcccatcattattcaaatagaatagcataatttttcaataaaattcttagggtaaattgcctatttccattttctgggaaatcaattttatggaatgacctcagacccatcctattccataaaaataggactttactgtactaataaaagacatcactatcttaagtatggtaccattttccttcaaggcgttctatctttatggacattggattttgaaagaactgtaaattcttctctgtggtattatatggagtaagctgaggtaatcattaagaatttgctcttgtagtttaagttcgtgataactttgcttcaacaagtaagtgtatctgactgtctttgctttctaaatattggaaaaattggcctgaatgcattctcaacttcttaagtagtaggaacaagttctgccttactacgcaaatctcaaaccttcataaagaatagctggtcaaatggcaaaagatccctctagcttctgctctatgccttgttctaaactgaccagagtggatttgtgtaagatgcctccagtgctttctcaggattctgttttgaagggtgcaaatatgatatcatgtagcctccagcatctttgtgtgtttatgtgtgtggtagaattcactgttacattttgtatattactttgaactgtccttatttgaagacatgaatgggagagtactgtttttcttttataatagctcttctgtttgttctgatttttaatattcagtaccttaaatgccagagaagcttatcaaagtcgtgtgatgttcaaagatggcaatatgtaatgcacctccttgttaaattgcaaaagatcataataggttggtgatatgaagcaagatgatcataaatcagaaagtaatttttgaggggaggaattctatgaaatcttgtgattataaaactattgacttcattcacctttttcttatctgagattatatgtaattcagtatttcatactgaattatagcagagatgtaggtctacaacaccaattagaaaccaaacaaatattggtgatgtttctatagcttgtgtagttctcaaattttggtcttgtaccttttggatgggacataaaagcagtaaagcccaccaccccacttattctggattagcaagtgggaagggaagaaatttgggcttcagctactggggtcctttttgtaatgtgtggcatcagaatggtgacaagtggagtgggtgttctgaaactgtatcattacctggcaaaccacccagaaacctaacagcataaaacacacattttattttgcttacaattttatggggaaaggcgaggccgaggtgttctaatttgggttcttccatgcattatagttagatagtggctggactgtggtcattgaaaggctcaccttggctgcctttagatgcctttaagatgggtcattcatatggctgggccttgatgctggttattggctgggagcttaggataatcaactaagaggcctcagttcctctcctcatgggtttattatggggctgcttgggcttcctcacagcatgatggctggattccaagaaagaatagcctaagaaaggtgttccaaaagtaagtggtccaagagacctgtgtggaagccacatgccttctaagctggctctggcaagctcagaatatcatggccatcaacttcttggtcaagcaaggtcctgaggtcagcctagatttaggagagaagaattaggttccacctctcaataggaggaatagctaagaatttgcagctgtctttaatctacctctgtgtatgtgtttatgtgtgtaagcatatatgcatgtatgtaattaaaagcagatgtacctgacttaattcaaaaagtgctttagagcctgctaaatttgtgctgtcttccctgtctggacagactttatttagactctgttggcttgcatgaataagaaattacagaacaccaggagacagactattcaaagggttttagtttctttattttattttatttttacctataatgcttagtgttaattacaccacctcttctctgcctgaaagtggtatttgtcaactctccaaacataattgggcccccaatttggaattgctcactttgcagtgggaatggacggtagttgttgaactgcaacttgtggtcaaatctttacatgtgtgaccagagcctcttcttagaagagagggatatggtgggatgaggaaagacatgaaggaaacatatttcgagcattttctttcagggtagacattaaagatccagggagacaacagttgaactttcctttgaccttctttagaaagtgaatggaaaagctgttctttaagctacttttgacctaaaaactttaatcaacattattttccaataaaaataaataaaaagaaaacctgaagtcaaagatgaaaggatctttggaaactgtctatttctccttccttttaggcaatttcttagagagaatcatagaccttagtgaaccttgctttaaggatgtcaaagtcgtgtcctcaccactggaaggaagaatttcagactccacagagcaggtgttctcaccaacatccccaagcagtttatctttgaaatgatgaatgtaaataaacttttcatatatcaaatcatttaaaaatatactatagaaacttacaatttaaagcagtctaagtataaagtgctttgctatatggagtcccttgatgaactgattacctagtaatttatttgttttcttttgaggtggatttacttataaatattaatatatatgtaaattatagacacatagaattgttgatttggcaggaaatgtagtggctttctaatccaactaataataatctaaataataatgtgttttataaattgtaaaatgctatgacatatgttaagattattgcccaaacttatatgatgttttataccaaagctgagtgaaattttagtccccatgcttcaacccagtgttttaagttgacccctaaaatttattaaagggactactattgatttatttgttttgttcctaaaataggattgaattttgagacaaaacactttgaggctagggagttccttctagttgcaatgaccacgattcaaacggatgctcccaaatgagtagcagcagtcccctaaactttctaaccaagatctgtgacacagtgcttttgccagggtggacaattaggagtgggaattaaaaagaatttttccctcaactatatatgcttttcttcataaaaatgaaatttcgattaaaatagcagtgcatttttccctgtgacagaataaacataaaaatataaatatattgaaataggttgagattctttttccaatcttaatttgtccatgtctgcttgaatcagtcatggcatttgtttctggctaattagaactcacttagggtctactcttgggatccaaagtcaggtaggccttgacactctttatggcttgctaacttgctggaactaattcgagttttactctaatagaggacttttacaaaccttttcttgttttcactcacctgagaaacacactcattgtcatggtccattagcattagcatcatggatcatagtaattttctaggaggggcacacgtccccaggatgtaaagatcatggggtggcggtaattggcaagcatgaagtatataagagactcgggttttattttggtatgtgctcccatctagagaataactacttttatgatttcaaatactccacctcagtctcccagaggtgtgaccgtattgggcaccttctgttgtagcctgagaggattctagcaggtattcctgtaaaacacctatgatgctttcctttagttgcaataggtataatttttttttttttttgctactatagcaacttctttctcttacttaacctgtacaaactttcagcagcagtttacaactatttcttaaagaaactatgcattactttccccaggatttcaagtatactttgaccttaacaatacaaattacaagctatatagtagcagtaaatgcaatgatggctgctatggaaaaatataataagtaccataaacttgatgggaaagcagaattgatagggttaacaatttatcgattgtaaaaaaataaagaaaaatgagctgagaagatgaccagaacttttgcacacaggtgaatgcctaggggtaccatcaatagaaatagaggatgcatgtaaaggagtaggtttagcagggaggataataaattccattatagtcatatactcaggttcatgtgcagatgcctagatggtaacgggaaatgtggaccagaagattgaaaggaaggccaattgagaatctggattgcaatttggtaattctcagaagaattgactaaggaagccttgagtattgaatgggggttaggactcatatgagagctattgcagagagatataaggattgggtagaagtcagcatcttagggcaatgctaatttaagtttcaggaagagatatcatagaacgagtagtcatgaaattagaaccaggacagcagaaggcaaggcaggaaaggagcaataccacgatgatggaggtggttaacagtaaattttccaaggaggacaaggaggatggtaatttggaaattgcttgagaataaactatatcctctgtgcaggctcccactaattaaatgcaaaatctaatgtaacatctcttgcttgttttatagtttcacacatctggattgtatcggtgtcttcaaggatacccatatctttgttaaaattaaaaaccattactgcccatgagcagacttttaaggtggcagccaggttgtgtccctggtcactttctggttacagtactgcccggtgttctaaattaataggctcaggtaataggctcagtcccaccaaactggttaatgtgtatagctcaatcagcttgatttggaaaatagaataggttatgtcatttaaggaattactgtcagccaggtggagtggctcacgcctgtaatcccagcactttgggagtccgaggcaggcggatcacttgaggtcaggagtttgagaccagcctggccaacatggtgaaaccctgtctctactaaaaatacaaaaattagcctggtgtggtggtgtgcgcctgtaatcccagctacttgggaggctgaggcatgagaatcacttgaacccaggaggtggagcgcttcagcctgggtgacagagcgagactccgtctcaaaaaacaaacaaacaaacaaacaaaaaatgaaatcactgaatccctgtcatttcctaaaagtagagtattacaaaaacacaacacaatacaaaatatattttgttttaaaatttaggagattatgtataactcttagaatgagttcaatcctggaggtaagaattgaagtccatgttatttaaaacaggcaacattactctatcagagctaattggttaattcctttcagttctggaataccgacagtggcatccataggttttaatatttatttggagacataaatatcaggaactaatgtctttaaaatcattggtaaagagaatgacctgctaccctggtttatccaggactgagggtgtttcctgggacataggactttcagtgataaaacctgggaagtctgaggcaaaccagaatgattgggtcaccctactaagaaatcaccattaaagtttgtgccaaccccatattctatgatttgcactgcaacaagtttgctgagggttaataaaaatttcccctgattaaaatgcataaacatattttacctagttttattgccctaagaactttgtctcatggaattaatattctttgaggagtgttaccaaggcctttcttacaaaagaagggaaactgagtgattgcatatgtattttacccccctggttggggttgggaagtacaagccaagcaaggagcagctgcccgtgggagtttttaatgcagagcagggcttttttcacgtgttctcattgaattactttttttctctttatggtctgttttccatgcagatatttttggaatgtaaaattaaataattcatgatttcccaatcattggtttaggtacagttgccatttcttgagttgattatactcccttgagggagcttttggagtttcctcatgtacagaggtttagagataagaactttgctgaagtgacaaggtctttgtaggtacaggcaggccagcaggggcaggaatggcatagttggctcattgctgacccttaggttaccacactattaagcagctcaagggttcttaacattttatatgtcccagatccctttggcagtctggtaaagcctagacccattctctaaataatttttttgatacataaaataaagtaggattataaaagaaatcagttatattgttatggttatcaaaatattaaaataaaatgtgatataatatgctcctctgttagaaggttgagtaacagtacctagcactggttctaataggtatcgtagtttcaatgtcattattgcagaaattctccaaaaagggctaccataaattttgttccttcctataaatgcttgctgctccttctatagggacatagagcttcctgccctcccctggaatctgtgctggcctttgtgactagatggactgacagactgtattaatagaataatgttcttggattttgaaggctaggtcacaagaacccttgcattagaagatccttttgcctagaagtctcatttgccattggggtgtttccttttggaacacataccttaggctatgggaatctaaatcatatggaaaggtcatttttgtgcactgcttggcagccccagatggagataagctgtagccaagagccaatctcagcttccagctatgtaagtgatctatcttggatatccagaccagttgaacccagtaatgggtcttggtgagaattctgatattttctttatctgcaagtacgttaaaaatctcctattttatttttaggtcaatgttactcaggatttcttatgtttactaaataatgatacttagaagggacattctaacgttcagttcattaagagtatatacataggcactggtggagctaatggtccaaatgccatccaagagagctaaaagagattaaaacccctcgcaaagccaaaattgatttacatgtattccatcactgctgtttgcataatgtgtgatatgaaaacagagttcagaaatcatgcatttattcagcaactatttactgggtgcataacttattatgtgccactttgcctcatgttggagataaaatgatgagcaaaatagttctgagacccacctggaacatactgcctagctggggagatagaaatgtaattgcatgtagttaaaaatgaatacgactaacaaatgtgctataggaaacattcagagagtaatgaaagcatatactgtaagacctggacctggactggcatagaagtaaattcaattacaattcatatttgaaggctaaaagcaacaatttagatattagctattactggtaagaaatttacccaggatttctcaaagtgtttcctctgaaactagctccctgtaagcatcacatggaaaaaaaagtaagtcaaacaaatttgaaaaattttggactaagcacagataaatacttttttttgtttctggtcttttcaaatccttttatatgacaatatgggttgtataactttcggagggggatatagtaccagctgttctccagcatgtttgatcgtgtaacacttttattcacagagcagcttatcatgctgaggattcagggaaacattttgagtacaaagagttctcacacctaatttaacactcacgaccattctgggagttttgttgtccaggtattaagaattaggggtttgggtatccaggtattaggaagattaagtcttctgtgaataaaaaaaccctgaaaattattatttttattaaaaattgttattatggtacgaggttgatagatatgtcagtttacatctctcttacataaaaatctgttccatggtgtcagggacttggaccccttctacctttttgtcctccagtgttttttctatttccaaagtcactcggtggtccatcaatgtgctggagcaccagccattgcagccgcattccaggcagcagaaaggagaaaggattcttcttttatttctcacatgacacttctgtttacatcttaatagtgtaaacttagccacgtggccacttctacctggaaaggaagctgggaaatgtagtcttttggctaggtgacaaactattcagctaaaaattggagttcttattactaagggaggataaaataaatactgggaagcagctaatggcctcggccacattttttgttttcacattttacagttgagggaaatgatcgcaagagggcatgcccaagaaagagctcagagataacagagacagtagagtcaaatctaggcctctggattccctgagtctgtctagttcattacactgttcctatttaaacatgtgggaggaaataaaacagagcctttaaaaagctgtgttattaagggtcatggtgatatacacagatgacaccgttgcaaaatatattttatggaaaaagtatgaatatatgtttctcagagcatttgcccagatttggaaattagtggtatttgattaacaaacaattgcaagcagtaagtgactgccttttgttttggctgcattatccaggccaggattctgtttgttgggctgctgtgcactccggggcccgctctgtgtctaatggcttgtccttgcttttcttcatttgtaacatcggcaatgctctgaaagccctggatctcgtttgaaaccatctgtttgcctctttatttacatgataacgtaacctgattgcaatttagtgtctggataaaaaacattgctcttacctagatggtgctgggtttttgtcaggcttaatgacaacccatctgactgcatttttcaggcagcagtagtgtgtggagagatggtgtctgtatagcccacgcacggaggtggtgaatgttctgcactctgcccaggctgtctgggctgtggtcagcaaggggtgcaaatggcaggcacttctctgctgtcttccagaatgttattggcaccaatggggccttctcatctttgtgcttcctgtgtccagggaagctccagaagagtagaagttctttgtttatttgttagaggagtgagcgagtgagtgaatgaatggatggaggcatggtggattgaatagagtgctgattaaatcccagccgctctcattcattcataatcggtgaacgtgtgttggatcagcaggaatgattgctgttggcatagtgaggctgaatgccttggggtgtttgctctggggacacggctgtagtcctgaatcaaaactctgaaactgacacaccagtccccttccctctcccctcagtatatcatagggcaggaagtagtgtgtggcagctccttcttcttgagaaatctagggggatgggtgtctacagcagagtttcctcccataggttgaggtattgataattccaatcttcaccacaatagcatttttttttcttactaaatcctgcggaaaagagaagtgggcaagatcctatgatgacacacattttgtgaatagggtttacatttagcaagatcacctgtagtaaggaaatagaggcacataccttatgtagagtggttcccaaattgctgacttctaaatgctcctagagaaaaatgggaaaaaaaacccctcaaaaaacaagtctgtccctaagatcccagagttctggtaatatgggaaagaacttctggggccaaggctatcctggaagccccatgactctctcttgctcctcggataaaacgtcctgtatctatccctgccttcaccccaggttgcttttcatgtactacaaagagggtcaagagcttggttcataatttatgttttccttcaccctcacattgaccccagggagtggagggaagggtattttcaaagaaaaaccttaagacaaattaaatttaacagagtttaattgagcaaagaaccgtttgcaaattgggcagcctcctgagccacagtaggctcaaagaggctctcgtgcagccatgtggcagaggatttatggacagaaaaaggaaagtgatatacagaaaataggaatgaggtacagaaatggccagattggttacagcttagcatttgccttttttgcacacagtttgatcagttggtcgcctttgactggctgaaactctgtgattggcacaagagtaggttacagtctgtttacatatctagttaggttacaattaactatatgcagagaagcctttaagccagacttaaaatatgtaaggaggcagcttcaggctaaacttcatttaacaggtgtcttctcccatccagctctattgcctcagcttcttattggctacaaagcccaccacaggtgtgttacctcaccactctccttatctcttttcctcttcctttagttgatttggtttaatgaaaggtgtacagacatctacatgcaattgcacagagcacagaggcatgggggtgtagatctgtcttagctgtctaagtaagtagggggcttccaacataggtttgaatgatgacttactgaagaacaaatagaaaatgtcaaaacctttatttttccttatttttattctattccttgaaaattttctttttctatgttttactatgtagataatatttattacattagtattgcactacatatgtgtaattagcaatttattaatacatttatgagaaagtaaatcatattgggaatatatggttaaaattttacccttccagaaaaggaatatttggcacttacttgagttttaatatcatattactgtttatttactatggcaagcatccttttttaaagacatattagtaaaatatgtgctatatatgctatacatgatcatatatgtatatggtttcacaaaagatttaacaaccaagtggcaaaatataaagtgagaaattttacttcaggaaccagagctaaggctgactatgaatctgaaataatcttgtttttttcttatttagttggaaataagttaacctttacagaaacctgagaaacccaattttcaaaatcagcaggctttaatttttctgaggccttggtcttggatatcgatgttgcatgatacttgggggcttcctgaagctttcagagtcgatttcaaacgtatttgtttggactgcagagccctttgtgatctggcctcatcgtctgctgttctcctgcatgcattgttgtccagttctacttatctactcattcttcttggatggaatcgactatttcttttccagttatttttacttgctcttcttactacctgtaactttttccacttctcctttctttccctttctctccctccccaccctaaacctctctttcagcttatttatttttgtcctttaacactcaacttggtggcacctcttctagaaagtgtccccgaatcctcatttgatttaattctccttccgctgggttcctacaacaccttggatatatttctgtcatatacccttattctgtaaatattacttacttttatgtcacctcgagaacagaggttatgtcttatttgactttttatatctctaatgcaaagcagaggatttggcttatagccacaacaaatgctagagtaaataaatgaaagagtgagatgcagtcactgactagtcagtccctactaaagtatttccaggacttttggaaacttaagggggagatgtcactgtgtcactgtcatactgagaatcttggcaaacaaagggtggatggagggtggccgttccctgagaaccttagcaactgacaaagaggtgctgattttctctggaagacctggtggtctgctgcagaactcaatctgggaatcattctacattagcatttatttatttagaatccctgggccagaaatgtactctctgtgagatgtgcttccctgcaggtaagaagatgcaaggagggggtgggttcgttccttttcttgatgaagttctctgaactctagtattcccagtaggcacctctcatttcctgtctcccctggtgagccggtggcctttcattcaagctcctccacacagcttgcctcctccctcctcccacaccttccacctgagcagttgacaggcctcctgtggctcagcacctgaggagctgatgggcctggtgtggcttgccaatcaggagtttagagctctctggggatttactgccttccaagcctgcaggcctcctgtggctcagcatcaaggtgcctgacacacctcctgtggttttagctagtgagcagcttgtggatcttctgtttgctgtgaaatggtttcagaggttaccttttctcatttgtatagtgtggatgcacctgtttttgtttgttttcttttttggtgaaactataaaagaaagagtgtaaatgagtaaacattggtgcaggcttagagctatgacattggctactgtgaggaagcccaagttttgctgtttgcagtgctaggcctaaatcccagtatggtaaggaaattatctgtgactgagagaatcgtagagtaactcttcttggctcctagtgtatgtacctggtatttaatgatatcttgcaagtctgaatgaattaaaaatgtttctaacacttctaaaattaacttattcatctgaaagccactgaaggaaggctttaaggcacagcaagctggcccctagttcaagtggaacaggaaggaaatggttaaaggatttttaaactgctaaagggggcttttacatttttctgggaaagcagcagtttgcatggaaatcacagcttttatacattaagtatggttatgagtctttccctcaaagctgtgtgagaaatgtggactttttttttccctccaaaggaaatggagaatcaggaccaaagactcatgtagctttatgcctaggtttttcaggtaacaaagagaaggggaaggctggtttgttcttagaaaatatagtattttattaataacatagtttttgccaccccatgcttagtacaagcctcacccagagaggaaaactttaaccacaattcttataagctctactattccgatatcttttcttttcctatcctatttctacaatctcccatcacagtcaagcccaaatcatattgcgttaataaggaccataccagaattttagttccaagcactgcacttactttttcaagatcccaggttacttgaataatagtggtcagaagttaaaatcagaaggccacaaaatattaccagtaaaaaaaaatgtaggaaatagtagagatattcacatttattttttgagccagaaaaagtaataagttatataaatataaggccatagaaggctatggcatgttgaggaaatatcagatccttcatttaaacacaggaacagttattacagagtatggtgataacagtggtagtactagcaacaatgtacccgttattataataacatgagttcagttttttaatgttccaggcacagtattaaatatttattttatctcactaaagctttataaatatggtgtgacattggcaccatgtttgacacactaagaaatcaaaattgagagcagttctgttaataaaaaggtcaaactcttcaaaatatttgaagagttttattttgagctgaatatgaggaccatgtcctgtgacacagcctcaggaggtcctgagaacttgtgctcaaggtggttgggttacagcttgtttttttatgttttagggagacataagacatcaatgaatgcatgtcaggtatacattggtttgctctggaaaggtaggacaacttgaagtgggaagcaggcttacaggtcataggtggattcaaagattttctgattggcaattggttgaaagagttaaattattatctaaaaacctggaatcaatagaaaggagtgtctgggttaagataaagggttgtgcataccaaggttcttattatgaagatgaagtctttaggtgactacccttagaggtaatagatggcaaacatttcctattcagacatttgaaaggtactagactctcagctaatctcttcaggatctaaaaaagacctggagatggaatgcgattctctaaagaatataaatttcccccataagagacagctttgcatagccatttcaaaatatgacagacaaatatattttgcggtaaaatactttgatactttcaggacctgctatctgtcatgtgatgctctactagagttgggttggaatttagtaccttattgctccaaaatagtctgtttgtcagttttaatatctctgttttaatgttaatgctggtcagttgtacctaaattccaaaggcaggaatgtataatgaggtatgtctgatgaccactccttcccatcgtggcctgagctaatttttcaggtttctttggaatccccttggctgagaggaggatccattcagttggttgggaggcttagaatttttattgtattttattttggtttcttaactttattttgtttcttaaactttagcatgcataaaagtcaatggaaatgtttctaaattactagtgatctatattttgaaccaactttgcaaatggtactgaaactctaatagggtgtctgtggacctaccagctattaaaaccctagcttagaggataagtaatattccctgggtcccacagctacaaagggaccgagcgggatgtaaatccaggtgtgtctcattcctgctgctctctccatgctggcctccatgttgctttgtacctgaatgaaagtccaatacctttcttgtcttagacatctaattatatatggctatctgacatctttacaattagtattaggcttctgtaactttgttctttaaaaaattttaaacataatacataatttttttctgttcaaaataatgtaaaaatatacaaagcaaaatatcaagaaccatttagccctttctttttgccctcccctggataactgctattctcagttgggattacatttttttaaatatgtgtatttatttatataatgaataactttaaaaatattaattaattgagtattttactacatatcagtttctatccttagcgttttggatgaattcactttggaatcctcacaacaccctgtgaagcactattaccatctctctttatcaggtagccgggaaactgagaaatagagatcataaaagtgattggtagagggacaatatttggacccaatagtttgactctagaactcttatatgccatgctaagatgttccttaattcagcaatgaaaagcatatgttctaagtattcatatgtgactttcaaaaaagttaagtctatattcaaaatactatcatatcagtaatgacaaatgtcctgcatccttttaaatgacagtgtagttacccagagtaggaatgtggtataatttattgaattaccatcttactgatgaacataaattttcaccccaattttttcacttttataaacaatacaatgacaaaaatatttatgcctcattgttcaagtgggagaattttttcaggtcagttgatcttaaagtgaattcatagcctacctatagctgagatcatccgggttacttctttaaaaatgcaaaacataccttcaaggaacacataatcaccatattataaactctttcagaacctggagaaaaataaaaatcttcctaattcattcttaaggctataggattgattatataattagataaaggtggcacaaagaagaaaattaaaggctaatctcattgatattgaggagaagtcttactaaatccaatgtacctgtgcttccaaagaatcacaaattatagttaaatagggtttaatcccaggaatgcaaggatagttctagaatatcaggaaaaataatctaacataattcagtaagacaaaattagaagtctctctgtttccccaagattgtactttctttttataataatgaggcacgatattccatatataaagagccaagaatgactaaataagttttattgtctttcttccccttgtcacgtgcagtgccagcttctgcctatactactctgtgtctttatctgagtaagggcttcttaaatattcagactgtccaaggttccagggcacatcagggccatggggaagtgtcacatattttaggtggctaagggtgagtgagcagagaaaactatttctagggcagtggggcagagtgaaggatggtatcagtgggctgaagaaggagaagatgaaccaaaacagaaattaataggcttattatggttcccaatcacaagtcttggaaaacttgggatactgagggtaaaatttctctgttattttatagaagcatctaaagtaaagaaatctgaaatctaagcagacatttaaaacaagatttttgaaggcatttcctgttttttgttgttgttttcttttggtgtagaaaatatgctgtcttcctcttgaatgtggcatagattatttgtatcccttggttaagggcaagagttaacaattacagtatgttaaactcatctgcttcccattagaagaaaaagtgtttacatggtagtatcgagtgaattttgtagggtgttttccaagaccccaaatcaatttttttaaaagcatttgataaatttctatctgttaatactcaacaacaatttattattacagaaataggggaatttctcttaactggatataaggtgtttacaagaagtccataggaaatattataattaagtgtgaaaggttaatttcattcctgttagtgtcgagaataaaacgtgaatgcctactcttatttctattactggagataccaaacaatgcaatagtacatgaaaaaaataggatagaaagcacagccacttgaaagaagcaggaaaacaattactggtaagcctatgtttttttttttctagaaaaaaaatacaagatatttaagtaaaatggctggcaacaatactagcatgcaaggaacaatagcattcctgtataatagcaatcactaattagaaaatgcaatagacaataaattccacttttgatggaaaaaggtaaaatacctagatataaacaaaaaattcatatgtcatgtgaagaaaaaccccctgaaaaccttgctaaataggtggaatgctgtacaaatacaggaagacacaatgatgaaaagattctcccccacatggatttataaattcaagtaagcctagttaaaattgcatttagattaaaaaaaattagaacgtgagaagctgattctaatatttttaggaaaagcaaatatacaactggcaaggattttaaaaacattattttggggaggattggtctagataaagctggtatgatattgtcataggaagaggcaggagaggaaagtgaatgagacaaaatagagtccagaaacagacccatggatataaaagaatgtacttagtaattaagatggcatttcaaaacagtgggaaaatactacgtttcagtaaattatgttggaatagttgtctacccacatgctaaaaaaaattctgttgtgttcccaagtcatgccatgccagacgaactagagtcttatattaaatataaaggaatcaaaaggaaatacaagaaactatttttgtatgcttctaaaatattctgtgtttttaaagtgtgtttgggaatatgcttaagctaaattttccatttgctttattttgtatctttgagtattagttcttgggatattgaattgattattgattattcagtatatctctttcatagttttctgattttctttgtgtttataattctttgtttgccttcccataaatccatatttcaggaagttgtctccagtgattatggaccagcaaagtggcaatagggagaactttctagagagtaatctatgcaaggtaatggagtttgatcttgtcctaatattaacttagcaagcaaaaactgaagtcagaataaattgaaacatcatactgaactccaattccaatggcagagtcaaattttgcgtagatccacattccataaatatccaaatgtaaaaattgcaaatatgaagataaaatgagaaaggaacattacctatcaaaatgtaaattaagggacattagaaacaggaagtcaaagccaggtcaaataagaagtctgcacagcttattctcttgctcatatttcttatattcctgtcagcagaaaaaaattacatgtctgacaaggactaaaagacacacatacataaacacacacacatgcaaatgtgtgtgtgtgtgtgagagattcttttttaatttgcatttcaaataaaattatgactagtctctacttttaattttaatttcaattttttaaaagattttaaagtagtgtatttactttgttcaaaattcaaagagaaaaagattgctcattgaaaattttcccttcacccatgtcttccagccagccagtttcatttcctgaagatggcagtgttactggttccttcctttggtatctttcgaaagatattctgtgctgcatatgcaaaaattaaaaaaaacacacactacatttatttttattcactccctttgtataaatattacaaattgtacactatgtgtgccttgctttaaaagctattattattccatgtaattattccatattagtatagaaagatatgattattccatattagtacaaaaagtactttaatttttaagagatttattgagatataattcacataccataaaattcatccttttaaattgtacaattcgtggtttttacagagacatgcgattactgtaattaattttggaacatttgattaccccccaaagaaaccccataccccttaggctataactccctagtccgcaatctcccccagccacaggcaaccattaatctactttccatctctacagattttcctactctagacatttcatgtaaaaggaatcatacagtgaagtttctcaccctgcatgatgttctcaagtttcatccatgttgtaatatagaactagtctctattcgagaatgaatggatggatacaaagactccatatgtaaaatacatgcttggcttgatatatggatgtctagatgcatgtgcattaatttcattaactattttatgtatttatacagcagtcactcattcttacgtattaattctcattagttacttttaaaagaatcctgttcagatggtgttaaggtaataaagttttttaagtagacattaagccagatgctcatatagatggatacacacacacacacacacacacacacacacacacacatatacatatatatatatatatatatattttttttttttttttttttttgagacagagtctcgctctgttgcccaggctggagtgtagtggcatgatttcggctcactgcaacctctgcctcccgggttcaagtaattctcctgcctcagcctcccaagtatctgggattacaggaatgagccaccatgcctggctaatatttttcatttttttagtagagaagtagagatggggtttcaccatgttggccagactagtctcgagctcctgacctcagtgatcaacctgcctcggcctcccaaagtgcttcgattacaggcatgagtcaccatgcctggccagatagatatatttttacacacagagttttatagtagagatcatccctgatttctattggttattagcagaagaagtctaatgtttacatgatatgatttagaggtgaactgaaagtgtgtcccaagttcatagtcttttgcagggtattttaggtatcctcaggctcctctttaaaggagacaagtatatgtaaattgcagcacccctttcttctctttctttcctcctgttgtaacaaagtgttttaccttctcccaaagataatcccacctgatgttctctgcatcttaatgctgttattccttttcagatatctcagtccataattgtctccttcctttctctttcttgtctgcagtctttccctctctatatgacatttcctattagcaaacacatttttgaatgctccatatgattttaaaaactcccttgaattaaaaaaaaaccctcatctatttttagataacgattcttctcattctgtcttggtgatttttggagaacatacattttctagttgtgaagctattgatggttcttgaactcataaatatgttttgtcttttcccaaggatcagacctatatgtgtaattgtccacttgaaatctgcactgggatgatgtacagttatcttaaactaaaataactcagagagaatcctctattcttgctctctccctaccaagcctgccattgccagtggccaacttactcttcttccagctttcccattccagcacatggcaccatcttccactctcaattgctcagggttgttcttgacactttatccaatcctggctattctgcttcttgaatgttactcagatatgtgttttttaatttcctctctcaccaccctaatatatgcatcatggcctcttgggtgaaccactagaatgcctcttttttttttattatactttaagttttagggtacatgtgcacaatgtgcaggttagttacatatgtatacatgtgccatgttggtgtgctgcacccattaactcgtcatttaacattaggtatatctcctaatcctatcctaatcctatccctcccccctcccatcagtgtggcaattcctcagggatctagaactagaaataccatctggacccagccatcctgttactgggtatatacccaaaggattataaatcatgctgctatacagacacatgcacacgtatgtttattgtggcactattcacaatagcaaagacttggaaccaagccaaatgtccaacaatgatagactggattaagaaaatgtggcacatatacaccatggaatactatgcagccatagaatgcctcttaattattcttctcctgctgtgcttaccctcatctactccattctcccccactgcagccagagcactctgaaaaatatgagttggctgtgtaatttccctctttcatttccccttagtggcttactttcattatcatgacaaaaatctcattgtttttacatagtcttcctaatctgctctcttgcccgcctttctagccctgcctcttacctctctcctccagattcagcaatgtgggcattcctgttgcttttcagtcttttttaaaaaatataatttcaacttttcatttatattcagatggtacatgtgcaggctggttacatgtaagtattacataacgctgaggtttgggatatgagtgaatcctttcacccaggtagtgagcatagcacccaataggtagctcttcagcccttgccttcatcccttctttccgtctctagcagtctctagtgtgttattttcatttctatgtccatgtgtacccaacgcttacctccacttataagtgagaacatgtagtatttagttttctgttcctgtgttaatttgtttaagataatggcctccagcagcacccatgtggctgcaaagaacatgattttattcttttttatggctgtgtagtgttccatggcatatgtgtaccacagtttctttatccaatccaccattgatgggcaggtaggttgattccatgtctttgctactgagagcagtgctgtgataaacctacaagtgcatgtgtcttttggtagaataatttattttcctttggatatatacccagtaaggtgattgctggttttaatggtagttctatttttagttctttgagaaatcaccaaacttttttccacagtggctgaactaatttggattcccaccaacagtgtataagcattcctttttcttcacagcctcgtcagcatctattattttttgactttttaataatagccattctgactggtgtgagatggtatctcattgtgattttgatttgcatttctcgcttttcagtcttttggatgtatggagctctttcccgcttctgacttttcatctgtcctgcctcctttctctggagcaactctacacctagttaactgctgctcactctttaggtctcacccttgatccctcactgttactctcatagtattatgtatttttcttcttaccaatttgcagagtttgtgcttatgaagttttgcaattgtgtattaatgtcttatttcctccacaaaattttagatttcatgaggccaagaactgtgtctctttggttcacacaatagcgaagtgacaggtatagagcaagtactccaagctacatgttgggcatatgaaaacaatagctgataattgaatgccttttatgtgccagccactgtaataattttttatgtggcatttcgcttaatttctcctgttaccgccccccccccccccaatgaattagtatttctctacttagtcatgtataagtgagttgagcctagagggacttgggacacagctgagaaattactggaactatagaactactgagacccttcatctgtgtggactgttggtggttgggcatcagtgggattctggccatttggtagttatgagcaaatgaggtcagtagtttatcagagatggatgggcactcgaaagtaggaagaaacagacatagtcttttttactttgaaatgttgcctgggctttgccatgatcattttggtgggtatcacaagcaaatactaaaaggacttcacatctacttctttgttcttccaaaactcatcccatcaatttcattacctggtggctcacacctgtaatcccagcactttgggaggctgaggcaggcagatcacctgaggtcaggagtttgagaccagcctggccaacatggtgaaaccccatctctactaataatacaaaactttagccaggcgtggtgatgggcacctgtaatcccagctactagggaagctgaggcaagagaattgcttgaacccaggtggcggagattacagtgagccaagatcgcaccattgcactccagcctgggtgacaagagtgaaactctgtctcaaaaaaaaaatttcttctctatgtgaagtaggagccttgttttatttatgtttgtttctttggcatatatcacagtgtctgacaaagcacttggtagtatttgctaagtgaatgaatggatgaatgagcaaatgtattggtcagtgataataccttttctttatatatcatttttctcctggggtcttctagtcatcttggattaaaaagaggaattaactctaaggacaaggatttcagtatgtttaccaagcaaggatattttagagtattgggacttttgatagaggttgtagaatccagatattattgttagaatagttagaattgtgaataaacattctaggaaccttcatgatctctgggacaatattcgaattcaagtggaaaataacatattttggaaaccccaagcaagaactccttgctttgaatacatgtaatttactggaatttacaagaagacttttaagggagttaatttttggggactttccaaaaaatatggaaaatataaaaatattgagaacaatgacaacttctacagaagttattttgtactttataaaatataagcactttattaatttaggagcacaacatatagattggtttgctcagaaaatataaattttggtacaacatattaaaatagaaagtagagattatttactaaatatttgttactcagatactacattttaaactctctcttaaacatcaattataattgatataatatatgtatatttaacaaacaaataggatacaagcatcttatttttaagattttaataatcttttgggtttcttttcctgcagaagaaacaattgagaacttaagaaaaaaagtcaataataccgaggaaaattaaagaatctcatagttttttggatatattgccctgtctagtgtcaagcagagacaaaaagagaagatttattttcaaaaaagacctgatggggagaaataaacttatttgatacaatatttgatatctggacctttgcctaaacagcaccgttcaggagtgaatcacttatttcatagatattcatatttttctattcagggtaaaagtacaaaatatatttatttactaaaagttgatcatgttattattcttaaggaaacaaatcaaaacaaaaacccacataggaaaataagtttggcgcttagtttggctttaacaccaactgtaacatgtaaaaatttaataattggatcacctgagagttgccagtttatgccttttcacatattaagcattattcactacaggattggagagggattttatctccaaacctcatgttagttagaattcattaacaatgtatacaggtaatagaattatgtggataaagccaaactgtagtttaacatcagacctaaaatttatcaaaatgcatattgttcctttttaggtcttctggggattgcaaggtctaggttttttgtttgtttgattgttgttgttgttgtttttgccttgagccatctgagcaaggtgacaactatagaccttggtttaaatggcaatgccatgtcgtccactctgatttctttgaagtctgatgaagagaacagtagcatagcaccgtctctagatttaaaacaataataataaagcctgggatgagagaaggcacagattcttttctatttttatgaaaacagcagcaccttctggtattctcctttcagaatttgggatgcagaggactgatctgatacagttggtaattttacttaaaaaccttcctattaaatagattcaaaatatttctgaagaacagatggtatagactagaggaagaaataaacattgtatgttaaacattttattgatcaattaaaatatcataatttaaaatgtttattctactatgggaattatgcatgtctgtgtgtgattgaaaaagacacagaaagaatgtggggagtgggatggggatttattgtccaaagtttaaatgggactcttctcatgaggtgagagtgagaagagctatttttctctcctccccttccatcctgtctctctctctctctctctctctctctcacacacacacacacaatcaggccagcagatggtttttcttcagggtgtcaggaaactggcttttagtcttgaatcgtgtgcctctgggcactttgaaactgcctcttctgcctatttttaagaccagtttgaaaaaaaatgatgggcagagtagaataaagaaaccacctgtgtggatttgatgaaaaaggcagactataaagctagcacttctttgaaaagagtttagttatagaaagactgcatccttatcttctagcacatctctggtcagctttttctacaagagaatgaactctagagaactgaataccatcatctcagtaaattagtctacttgacactaattttcaatcatgttcatctttcatctctgtgaactatttatgtataagagtttccattctattttaggaatacttttcttggatgttatcattcatctttataaattatgatagactatttaaataaattgttagatgcctccaaagttaaacgagaccacaaaagaaagaaaatatcaccaatcattgtgtaaaatgtatatttaaagcagtcactttggagctaaaaatattttctttctacaaaggaagattagatcatttaatagtgattcaaatagctttaaaatttacttttcctttggttcacatatttaatagaaaacacaggagccaaggctgaatgtagaaaaaaaacccattaattatggaaggtacaggaaaataacaagcccacaaatagtccttgtatgtcctgctctgcctggcatgccattgctctccctcagaagtctgagctgtgtccaaagtcagtacaggctgctttcctgacaatagcagggttgtaatagaaactgtcttaccacctaagttatggggcctgatacagtgcataccatacaagcagtgggtctgcctgccctaaattatgcctgttcatgtgaccccatcattattcccaggatctgtgccctttgcccttgatctcatttctacaggatttagacaagtgtcagacccttggaatgctacacaatagtgaccttgattccctactttgctgggaaaaaaagtgagtttaaatctagcgttcaacttacatggaatgctttgtaactgtggtagtcaaattgttcttgatacaaaagaagccccagccctctttcagagacatctgtctttcagtctggctcaggttttctggtcttgaggctagttaatgcatttctaataaaacactgagtcttttttgttgttgttgttgttgcatttggtgcagggataaattcaggggtttctccttattgttaactttccagatattatttttaaagctttagtgttctaattgtaaaaatagaacactttcaggaaaaaaagaccaaaaagccaaaacactgcttggcaaaacacactaggataaagatggtggtgtttagtgcttgatggatgaacaagtggttaaagggtgtaattcggaaccaagaggcaccaccccatggctagtcctgagcccctttggggggaaaagcagtctttaattacatctggaactcattaattctttttggagcctctttccagatcagctcccccatcagccacccattgagcaacagaaattccagatggttccctccatatgccagtgctgattctctcaagtaggatagattggtcactgacaggatagggtggaatatctgtagccaaggcaggacacggtggaaagcactggaacacacttaaattagaggtggtccatcacttatattattaagtaagttgtataaataactatttctgagtgattgctctgaaatatcttgagtaattttatggaaaggatgttaattctagagaatgtggcacatagatgccagctttccactcctcaaaagagagaaatcctctgcaagtgtcattgtagctgaggatttgtcagtttagacctgcagatgatctgctctggagggtacgttagggtgaattcttttgctcatgtaactagctgaaatatttattattgtgatacaaggagaatgcctttataaaaatctctatatggcatgtgcttattttattttagcagaattttcttataatagacacattgatagactccagtttgaagcagctgggaataaaaacagagtcaacctccatgtaattaaaaagtatgtcatcatttcaagtatatcacattatttatttgtatatatacctgttttcatctgatggtgggaaacatgacttactcatgtttaaattcctaccacctcaaaatttgtcacattatgggaaaggaaagaaagaaagaaagaagaaaaaatggagagatgaatccagggaatttcaaagtgaagagtgtggcaccaaaagaaataagactaatgtttctgttattgtcttcattctatacttttccttagataactattggaatttatgtgtgtgtacacacgtgtgcttgtgtgtgtgtgtgtggtgttaattttgaccatctattatgggttaaatattattcttctaggtcctgagaaaataaaagtgagaacatcagctgtgttcctgttctcaagtggttataatagtctgtctgtgattcatgggaaatttgttggtacatttggagttggtagggcaattgaaagggaaaatttcttctgaaaggggtataattaaaacttcatgtacttgtcatattttagctgagaaatacatctaaaagcacctactatcatacttttatgtgtatgtgtgagtactctgtggatgagagaaagcattagttcaaccaattttattgttttgtacaatcaggtttaatagctgaatattggttgagtgtgctataggttggaacagatataaaccaatttgtataaaactcttgctttgagacagggagaatgaaaccaatttggaaaacatattttaggatatcgtccaggaaaacttccccaacctagctatgcaagccaacattcaaattcaggaaatgcggagaaccccagtaaggtactccatgagaagatcattccgtagacacatactcatcaaattctccaaggtcaaaatggaggcaaaaatgttaaaggcaaccagagaaaggctaggtgacctacaaaaggaagcccatcagacaaacagcagacctcttaatggaagcactgtaagccaaaagagattgggggtagatattcaacattcttaaagaaaagacattccaacacataatttctttttctttctttcttattttttttgagatggagtcttcctctgtaccccaggctggagtacagtggtgtgatctcggttcactgcaactctgtctcctgggttcaagcaattcttgtgcctcagcctcccaagtagctgggattacaggtatgcatcaccatgcctggctaatttttgtatttttagtagagacgaggttttgccatgttggccaggctggtcttgaacttctagcctcaagtgatccacttgcctcagcctcccaaagtgctggaattacaggcacgagccactgcacctggcccccaacctagaatttcttatctggacaaactaagcttcataactgaaagtgaaataagatccttttcagataagcaaatgctgagggaatttggcaccaccagatctgccttacaagaactgaaggaagccctaaatatgaaaacaaaaagctgttaccagtcactacaaaaacacactgaaatacacagaccagtgacactatggagcaaccacataaacaagtctgcaaaataactagctagcatcatgatgacaggatcaaatacacacaatatcaatactagcattaaatataaatgggctaaatgccccaattaaaagacatagagtcttttaaagctggataaagaaccaagacccatcagtgtgctgtcttcaagagtcctatctcacatgcaaagacacacataggttcaaaataaaggaatgaagaaaaatttaccaagcaaatggaaaacagaaaaaaagcaggggttgcaatcctagtttctgacaaaatggactttaaaccaacaaaaatcaaataagacagagaagggcattacataatggtaaagggttcaattcaacaagaagagctaactatcctaaatatatatgcacccaatactgtagcacccagattcataaagcaagttcttagagaccttctaagagacttagattcccacacaataatagtgtgagactttaacaccccactgacaatattagacagataatttagacacaaaattaacaaaaatattcaggaccagaactcaactctggataaagtgggcctgatagatatctatagacctctccaccaaaaaacaaaggcatataccttgttctcatcaccacacagcacttactttaaaattgatcatataattggaagtaaatcactctcagcaaatgcagaagaactgaaataataacagtctctcatagcacagcacaatcaaattagaacttaagattaagaaatctattcaaggccaggcacagtggctcacagctgtcatcccagcactttgggaggctgaggtgggtggattgcctgagttcaggagttcaaaaccatcctgggcaacacggtgaaaccctgtctttactaaaaatacaaatattagccaggtatggtggaagacacctgtaatcccagctactcaggagcctgaggcaagggaatccatttgaatccaggaggctgcactgagctgatatcacacccctgcactccagcctgggtgacagagtgatgagactctgtctccaaaaaaaaaaaaaaatctattcaaaaccacacaacaccatggaaatgaacaaccttctcctcctgaatgactcttgagtaaataatgaaattaaggcagaaatcaaagagttatttgaaactcatgagaacaaagatacaccataccagaatatctgggacacagctaaagcagcattaagacagaaatttatagcactaaatgcccacatctaaaagctagaaagatctcaagttaacaatctaacattacaactaaaagaactagagaacctagagcaaacaaacctcaaagctagcagaagacaagaaataaccaagatctgagctgaactgaaggacatagagacatgaaaagccttcaaaaaatcaacaaatctaggatttttttgaaaaaaaaactaattaaatagactgctagctagattaataaagaagaaagagaagattgaaataaacacaatcagaaacaacaagggggatattaccactgaccccagagaaacacaaacaaccctcagggaatattataaacacctcttgcacataaagtagaaaatttgggagaaatggataaattcctggacacatgcaccctcccaagactgaacgaggaagaattgaatccctgaatagattaataatgagttctgaaaatggggcagtaataagtagcctaccaaccaaagaaagcccaggaccaggtgaattcacagctgaattctaccagagttacaaggaagagctggtactattcctactgaaactattccaagaattaaaaaggaaggactcctccctatctcattttatgaggtcagcatcatcctgatactaaaacctgacaataagacaaattcgggtcaatattattgatgaacaccaatgcaaaagttctcaacaaaatgctggcaaactgaatacagcagcacatcaaaaagtttatccagcatgatcaagtagtcttcgtccctggaatgcaaggttggtttaatgtatgcaaatcagtaaatgtgattcactacacaaacagaactaaagaccaaaaccacatgattatctcaacagatgcagaaaagccctttgataaattcaacatacattcaaattaaaaactcaataaattattgaagaaatatacctcaaaataataaaagctatatatgacaaactcatagccaatattctattgaatgggcaaaagccagaagcactccccttgaaaactgtcacaagacaaggatgccctttgtcaccactcccattcaacatagtattggaagttctggccagggcaattaggcaagagatggaaataaagcatatttaactaggaggagaggaagtcaaactatctttgtttgcagatgaaatgatcctatagcttgaaaaccctattgtttcagcccaaaagcttcttaagctgataagcaacttcagcaaaatctcaggatacaaaatcaatgtgcaaaaatctctagcatttccatacactaacaatagacaagccaagagccaactcgcaaatgaactcccattcacaattgccacaagaagagtaaaatacctgtgaatacagctaacaagggaagtgaacagttctccttaaggagaacttcaaaccactgctcaaagaaatcagagatgacacaaacaaatggaaaaatattccatgctcatggataggaagaatcagtatcatgaaaatggccatactatctaaagcaatttatagattcattgctattccccttaaactaccattaagattcttcacagaattagtaaaaactatttcaaacttcatataaaaccaaacaagagcccgaatagccaaggcaatcctaagcaaaaagagaaaagctagaggcatcatgtgacccaactttataccgcagggctacagtaaccaaacagcataaccaaacagcatggtactggtacaagaacagacacatagaccaatggaacagaaagagaaggcataaataagactgcacacctacaaccatctcatctttgacaaacctcaaaaaacaagcagtgggggaagaatattctgtttaataaatgatgctgggagaattggctagccatatgcagaaaaactgaaactaggccccttccttaagccatatacaaaaatcaactcaagatggaataaagacttaaatgtaaagctcacaaccataaaaaccctggaagaaaatttaggcaataccattcaggacaaaggcacaggtgaagatttcatgatgaagatgccaaaagccattgcaacaaaagcaaaaattgacaaatgggatataattaaactaaagagcttctgcacagcaaaagaaactatcatcagggtaatcaagctacagaatgagagaaaaattttgcaatctatgcatctgacaaacgtctaatatccagcatctataaggatcttaaatttacaagaaaaaacaaccccattaaaaagtgggcaaagaacatgaacagatgcctctcaaaagaagacatacacgcagccaacagacatatgaaaaaaagcttaacatcactgatcattagagaaatgcaaatcaaaaccataatgagatatcatctcataccagtcagaatggctattattaaaaagtcaaaaaaggcgcggtggcggacacctgtagtcccagctactcgggaggctgaggcagaagaatggtgtgaacccgggaggcagagcttgcagtgagccgagatcacgccactgcacgacagagtgagactccatctcaaaaaaaaaaaaaaaaaaagtcaaaaagcaacagatgctggtaaggttgtggagcaaaaggaatgcttttacactattggtaggagtgtaaattagttcaatcattgtggaagacagtgtggcgattcctcaaagacctagaggcagaaataccattcgacccagcaatcccattactgggtatacaaccaaaggaatagaaaccattctgttttaaagacacatgcacgcatacgttcattgcagcactattcacaatagcaaagacatgaaataaacttaaatgtccatcaatgatagactggatacagaaaatgtggtacatagatacaatggaatactatgcagccataaaaaggaatgagaattatctcatttgtcctttgcagggatatggatggagctggaggccattatccttagcaacctaacacgggaacagaaaacaaaataccacgtgttcttgcttgtaagtgggagctaagtgatgagaacacatggacacaaggcagggaacaacacacactggggtctgtcagagggcaggtggtgggaggaggaagaggatcaggaagaatagctaattgatgctgggtttaataccttagtgatgggatgatctgtgcagcaggccaccgtggcacaagtttacctgtgttaacaaacctgcatatcctgctcatgtatccctgaatttaaaataaaagatgaaaataaaataaataagtaaataaattggaggcaaaaccctcttgtttttacaaattttgcttcaaataattcttaaagtcatgaacccataaaatgtgtgctaaacctagaacattctctaggtacttcactcttttatttgaatattttgaaaagtgctagagatgagattaagatatatatttatttttgtctgtttagcttgatcattcattttgtaccagtcatcaatgagctcttgaatttaaggtatgtaggggattaaactcaacagatctggacgacatttatttagtgtctttatcttcagtattgcaaaaacactagggatttaaaaagaaaaagaatgatctcttcacttaaggaagtcagagtgggagaggaagtcataatcacactgaggaccagcccagtgacagttacttcctcacgtacaataatgtatgtatataatttgaataatgtgtctcagtactctgatagatgtatgtacagggtgtcactggagtgtaaaagagagaggttgtttccccagggagagtggtggagccagtgaggagagagaatagcttgctagcagaactaatgcttgctttgcatcctgatgggataggaccatactttgagaaccactgctctacatctaactgagagaaaaggggagggaaaaggcatacagaatttatggaacaggcctagagatgtcatactttaatttttcccacattttattggctacaactcagtcacatggcttcatcaacctgcaaaggaggtggaaactgtagtctaactgtgaacttaggaaaacaagagaaatggttggtttacaaccctatagtctctgccacaggagggcatggccattcttataatgcaggaagcagggaggggctaggaaagacaactcatgacaagttaatttgcttgggcatgtccttaagaagagcaagtgcattgtttcctagaatgagagatgagattatactaacaaaagaattccttataaatctttacatgtgttggtgattatggtactagaaatttaagcaaaaatctttatttgatgtcatttatagtgttgaattactgctaaatttcagaaagtaacacttaatgctttggcatacatgaaatacttattgttttaaatgaaaatgttgtgtttatatattactctatagtaaatctcaggcaacagctatgattatttcttctgaagttatatgaagactgcttttatgaaaggggaaataaaatataatgattttaaattgtccagtaagcactataagcatgggaagctaagggacaacagtaaaaataataacatcaagcgtttattaagcatgcaccatgtactttaccttacacaatgggacttagggaattagagatagcttactaacattgtataaccactttcaatctattaactcaattaaatgagttaaccctcacaaaaagtcctgtgaacgaaacagttgtttttagtattattcccattccacagatgagataaccgaggcacagagagataaagttatttgcctagacagctagtaagtagcagaattggtattcacatccaaatagtcttccctcagaggccaatgtcatgtctactgttctgtacatccctgaaactagagccaaaagtgaagagacaggacaaagggtagggagctcattcgatctgtgtgtttccactgcactagacttggggcagctgtttggtgcataagcagtgcattttgtccatgaatgtggtatgttaagcaattgcagcatttatcaatcagaacttattttcctgttcagtaagtcctagcttttggcagactatttgttcttccagttgctatacctgtcctggtttagataacactgtacacagctcccaaactgctgggagaaccccagaataaacacgtaattcttgtttttgtgacatatctgagcaatttctttttcttccacagacagaactgtccttgtggatacagatcttccattcttcaaagggctgtatgtgatggggaccttagacttccctgtggacagaagcaatgttctgagtgtggcatgcatggtcattgcaggcggggagctgaaagttggtgagtaaaggcacaaggattgcgagcatgttgagaattatattctgtgagaaggggctctgggaaacagatggtatcatcaagcaggttgcttaacagagtttagggagggttaaggtagtagtgagtgcaccagtaaagttgctcttcggcaagctttacatgtggtcagaggtggcttgtattggtcattctttcatgcccgtgtactatcaggctgtttctggtccgcctgctactgctcattccagggtgattttttacctcctccaggctacagatcaattcttcctttaggttttctttgtgtcagaatatgcctttaactcgctctttcagaagatatcataggatggatttgatatcatctgatcaactaactcacaataaaatttcaattgttgtcttaacataatttcctgggaaaacagacttgaaagcaaagctatgtgctagcactttactgggacaaataatcccaaagatgtgtgagtgaagggaaaagaaaagtgaggaggaaagggagggaaagcaaatacaaggtagccacagcttctcaaagaagcatgcttggtttgcttggttatgtgggatatcttgagagaagccttattagaaccaccatatcttgggacaatatggaagaggtagtgaggagaaggcaagcatctcacctggcccattccatgccattaactcctctgactttgttatttttgtggctccctgggtagctagtggaaggaccagagaatcagtaggtgctcggagatgaggctcctcttgctgggaagtggatcatgttgttgaggccacaggacaggcagaatggaatggatctagggtagtgtattaaccagatttggcttacttaaataaaaaaacctgaaatgttatgggtagactatatacttagaactgttgtaagcaataggtataaatgctgaaaagacatgtaccctgtctccaaaggaactaatttagaactttagtaaggcattttactttgccccaggaagaagattgaaagagaatgcccagaaaaaaatcatatcttattccaaagaaatatatctctggtggtaaggaaatatttagatatccttgttaggtagcatgaaaattttagaatctcagttgggagaaaattctaggtctaattacctgaacaaaggttaagttactgtaaaaatatttctgaaaaaatatggtcaatccttttcttgaatacttccagtgacaaaaaaatcaaaacctttcaaggcaacctgttcccattgtttaaaatcctattagaattctttttgttctattaagctaaaatctatcttcctctaatttctataggttcaggctcttccccttgagccattcaggacaagtatcttactccttttaattctatagcccttcattcacatctttttgaatcttttctgttttaggtcatacagtttataaccatggttcatagttattgctgttttaagtatttctttttagtctatggtacaaaactgcaaacacagaaaaacaaagagaattatgtggtggaaatgaagtgatcactcaaagtttccaagtgcaaatatttccaagtgcaaatataaccacaattaatattttggtgttttatctcaaagtcattttttttcttacacatacatacacatgcacacatgtatttcaaaatgtagggtacatactttgatttttttgatcctgtataaacaatgtaagaatttccacaactcattatatttcaaaggcccaacttcaataatttcaacattatataatatatgggaatatatagatatacatgtatatataataatttagccatgtttctattgttaagcacctaagttatttcagatttttgtccttgtaactcactctgcaatgaacattcaataattaaatcattattcatatcttcatttccttaggatgggcttttaaaaatgaaattaatgggcctaaggataagaacatattttaagatttttaatacatgctgccaaattgcttttcagaaaaattttacaaatttgtacaccccatttcccatagttatgagattccctctttcttattggcattgcctctaaacacaactttgttttgtttaattcctctgaaagccagggagaaagaactattcccaggtgggatctgactattctgaacagagtgagatgagtatagcagttaacagaatgggctctaagtcagatgttgggggtccaaatccaccttggccacctgttggctgtttgaccttaagcaagtcaacctctgggcaccttcatttcttcatctgcaacatatgtgggataagagtagaaccttcttcagagggatattaaacataactcataggaagtgcttggtatgtagtaggtgttcaataaatgtttatcagccagggtgcccacagaaaatatatgtcatatgcattagacagtttgaagggatttaaataaagaaatgatttacaaagatccaaatgggatgaggtataccctagggctcataaagccagttatccttactacctcttgccataaaggattgagaaaagaatgttataggaacccagagataaagagggaggtttagagatggttgtcagaccatcccagaggcatggcctttgtatggctgggatttaaccagtacatggaaggaactataggaataaacactcttacctcattcttttgtttccctcctgtcttctgcttgtgctaccatttggccacatccgactggaagtcagaataaaggagaagtcagaataaaggagaactccttgatgcagtacacataggtcagccacatcctggggcactgggtagggtggagaagcacagagtttggaaatggaggtgtcaacagaagctctccagcatagtcagcctccagctatcagaacagatatgattcttctgttaatacagtcaaatattaaactaacttctttttccagccaggtcatgccattagtcctgccaactacactgtcagctctaattcctgctctttatatttgtgctgccacaaatacatatctctacattgtacagttgtattgggctgattttgctttcccttgggttttgagggaatctaagggcaatactttttacctatcccttcatttaattatttcagttcatctttctacactgcagatattctcttgaagtctggtcttttcctcacagattactgccatttgcccatttgtttactattctgtaaaatcctcatccaattaattgagagatattaaatacagttgagccctgttcttgttactacaaaacttatttccagttgatatcttttattgctaagattgatctcttttttcagtaagttacatttagatttctaaggtcactcattactataatatatagcttgctgactgaaaaatttgtacctttgaaggtaagtgacactgtgccactttccagttttactttatatatttcaggtctcatttaaaaatttctccattcccaattctattttctacccatcactggatagtggtgtattctttttctctttgtttcatccatgtgttccaggcctaaaggtaggttattggaacccatctgcccaatgctatgtgtattgtgcctgaaggaagactttcaacccatctgtccaattttaccacatcctaaagaaatcccaacatgaaacagataataagactagttagtaaacaaacttaatagatttggacattggcacagagtgctgccagagtatgcctgctatctgatgccatttgatccaagtcccaacattgtggaattatattttttggtgatcctgcttttttttttttttcttgagatggagttttgctcttattgcccaggctggagtgcagtggcgccatctcagctcattgcaacctctgccttccagttttaagtaattctcctgcctcagcctcccaagtagctgggattatagctgctcgccaccatgcctggctaatttttgtagttttattagagacagggtttcaccatgttggccaggctggtcttgaactcctgaactcgtgatccgcctgccttggcctcccaaagtgctgggattataggcatgagccaccatgcccagccggtggtcctgcttgtaaggcaactggtgctggcaagggtatcaatggacttttaatagagttgaatcatagaatgctagaattagaaaggaagctcaagatcaaagctttgcttagagggccatagctgcatcacaaatgccaaactcaatttcattcttcgttcagtgcttgtctcattagtctgataaaacagttaagataagcttaaagaatttcacatgtgtgtccattctttcatttaacatgggtttactcagcgtctgccatgtgccaagtaccatgggggatactgggcatatagaaacagaaatcatgaacctgaactttcaagaggtgtctcaataaaatagtgtgacaaatgagtaaaaacatgattggaaggatcatgtcttccaacctagagggagcttaaagataaaggaagagatgtgaacaggtacatattttagatgagcattatacttttaggaaactgtaggggatgggtatgtctggattgtaggctttgtatgaaatggtggtagtagatgaagcaccttgacctgatatactatgccaaggagtttggattttcctatgaaggcagtgggtagtcactggatagttttaagcaaggaagtgacatgattatatttattcttagaaaaattagtgctggaagtgtagagaatgcacttaaaagggacacagtgaaaagtgagaagcctactgagatgtttcaggaaagaaatcgtcagggagtgaagtaaggtacaggagttaaagagtaaagaattaattagagaagcattgaggaggtaaaaatcactagaacctagtgagaattttgatctgaggcaaggaagagttatttgggatatatccagggtttcgggttgggagatctgggccaatggggatgccaggaatgagtgccctttccatccctcattagttgaatggccctcggcaagttatatgaactagctgtgtctcagtactcttatctccaaagtagaaataataatagtacgtatttcatagagtttttaaaaaagtaaattagttaatgtttattaaaatgcttgaacaatgttgagtatacagtaaactttatacattggtttgttaagtacccagactcataaatttcaaagttagatttcagtgaaagatctaagtgataatatctagagaacaagcagatttatgaataaagaaaccagtgagagaggtctgcgctaaatgtacatatttgaggatcatcagctcaaatgtgaaattaaaagtgtgaataaaactggccaaacagattttgtggatagaaattttgaggagcgcaagtctttgaagggtggtagaggaagctgagttcaggaaaagaatgaaaaagaaacagttatataggtggaaagaaaatgaaatgacaggaaaataatatcttgaaacaaaagaggcaatttacaagaggaagtagtcagtaatatgagatacagtggaaatggcaaagaaaatagaaaagaaaattggccatcttattccagctttttgttttttataatggctgataaatacagttttgacacaaattattacttttcatgtaaaacaaataaaaatgcaacacttactgcttcaggagcaataacttttcataaactcaataccatttatctattctttaacaacttcattttttggctttagtatatagcctgaggtgtcattgaacatattgaatttcatggttgaaaatgaatagttgtccatattgagtcatggcatcaaacctttataggattgctttcatgaataactggttttcttttggatggtgaaatgaaatgaatagatcgatactaaggagaaaataattcctctgatatggtgattttccaaagtttcctttgtagatttgtcccttcctcctttacctcctcccacctccctctttcattgaatgccaactcagtttcaggcattctttctgtcatttgaatattccacagtgaacaagacattcagtagtgaacaattcctgcttgcattattttattgggggaaacagacaattaaatagtaaaataaatgaggaagataagtttagatggtaatacattctctgaaagaaattaaataggaaaagtaattaatgagaggtccaggttggatgctggcaaccatatgttagatagtaaagacctttctaacaagtcaatgtgacatcagactatagagacaagaaaaagctagacctgcgaagacttgaacaatagcatttcaggctgagggagagctagtgcaaaggtcccgagggagaaatgtgctttgtgtggtagtcgtgaggcagaaaggcagcccctgtagctaaagaatagtgaatagtagtgagtttatagtgaacgtcatgagtttcatgggctagattttgagatatacagtgttgctttctaaatgagtccaaattatgctgagaattgctacttattgatagtctcttgagtatggctttaacaagacagaaattagcttcataaatatggaaattccagagacatgaattgtgattttagtttagtaactcattgtacaatttctggaaaattccccaatagaagattcataactgtgatgttgcaaatctctgtgattgtttgaaacgtctgtctcgttttattggtaaggaaactgaaatccagagagataattgatttgtttcaaggtctcagagctgacaaaaaacaggaccaggacaaatggctgttttagctatcttaaatatcatccttcaagcctttgcccaaggactacctttattatttaatggcaaaaaccacaattacttttgcaccaacctatatgaagcctctcctgtctccatgcagtagatttcagttacctttccttctgatccgtgctactcattcatgttgccattactgcattcggtaatgatatgaatagcatgttttaattagtgtcctatctccattatatgatagacttaatcagaacattttataaccctagtacctactgcattatagaattctgataatatgctgttatgactgacaatgtatatataagtgaatgggcatgtttaggtttgtctttcagctcactgcctttttcttggaaaacattcaatctccttacacttaaatgtctacatctgtgaggaagaaattatggtgttaatgtttaaatgactacaatatatttatcccctatgtgaaaggaaaaaaggagttacaaaaacaaatttaaaaagttgatgtgttgtaggattcaaagtattttcatttttacaatctgttagaacaggaaactgacttaaaaatgtcccccactcaaagcttgttcaataaacatttgtttgttatttgatttaaatgtttttttaaacatataaaagctttgcccatgaatagctgtctgagcccatccctttcatcaatgtctcctcttatatgagacattgttctcatgctttaacaaatatgttccttgttgttttagatatcaatgctgttaacttgttattgacccaaacagtcaactcaataaagactgttttaatattgtacttttaaaactgcaaatgaaaaatcttcttttaatatttttagaaggacttcagataggggttaccaataatacatttgtattaattattaaaataatataaaataaatatagtatttaaatattataaaataataaatttatataattttataaaatttatttgtattgtaaaaatacatttttgaaacacatatcctaatggatatttaaagtttaatagaaacctccttgatccctagtcaacaagatatgccccaaccattggtatccctggggacacagcagttcattgtttctttggcctgtcacaaccaggtcacatgatgcactgtctagttgctcagtaattatcctaggcactcgggcttttatcctaaaacttgtcacatattgtttttcagggtcagtgatgggtatttgtcagccctgtctcacatttgtagccagaagcctaaggtcatcattagcacgtgcctttgattgtcaggaaacgaagtactaggtatatggaagtttctttcattgcttccatgattgggactttctcaatcctaaagaagaagaaaaatccatacacagtttattgcctttcaaactgacagttctgtaaggctcattggatgattaagtaataagaaggagacaaacctgagaaaagcgtagattaaaacatatcctccagcttaaagccacaatacccagtagtcagacccattgagcagccagagagaatcttgtatgtgatgttcatttaaaaaaatatacaaagttaaaaaagtatgtcctccttcagatttaactatgattagaaaatgacacaaatacccacatatgcaatgtgtataatataagtgtacatagatacctgcaaaatagatggttagttcagtttatttagatgcacagttccctaatcaaactaacggttgtttgataaaataaaaaggtgacataaaagggatgtgacttttgaagctgttacttatttaaccatttaaccatttgctccatttaaccaggagcaaaagtgtaaaacctttgccccttagaggttcaggaaacactaaaactcatttctgtgcttggagagtccctaataaggctggcagccaacagttaaataatacttatttcaaaatgatattaagaatagaaagatctgtttattttctgatggatattagttctctcacaacatcacattatccttaaatctatatgtgtgtgtgtagttttaatatattttttaagccaaacactaatacaaataaatattcttctgtcctattgggacatcagttagtctttactaaaggcatttgcagtaatcatctttcctattttaataatttttaaatcagtctttcttaaactgtacttttgattcatgaatccatataacagtaatataatatttcttaaggatttatttagttattaaaataattaatcatataaatttattataaactatttaattttgcatacaaacaaaataattttaggaaagctagtgaataaatgaatgaatgatttttttttttagttagaaaacttacaggaatgtttcagtttaaggtaaactttgtgttttctgaagttccttgggctggccattgaaataagtagtcacttaatatttttgctttgaaatgtctagtgtctagctagtactttaggaattagatattacttgctaggaagagcttgccttatttttttaagttttcaaatttaaaggttaattttaaataagtgtgatacctccatggttactattactgtttttttaactactattattaatattgctaagagccaacattttttaaaaacatgtattatgtacagacactgtgccatatactattagcatggactaaatcatttaacctcacaaaaaatggatgctattattgtgcctattttatcattgaggaagctgaggcttaaagaaatgaggtaatttgctcgaccttatggaggaagttttcagaatttttgtacattttgcaagtagtgaatgaataacatattttcatgtttattttaatattccattaattgaaaaattgagaggcctcattaaaaatgaaaatttgttagcctgaataaaatcactttatgaggggttggacattataatttgataatgcctactgatttttataaccaatttttatcttactggactgcaagccccattctaccctacatttattttcagatggaatcagttctactggagaggaatgttttaggaataagcgagtcaaatatacactgggaattaaaagctaattcagaaaaaaatatgtgctgcaatttacttggttgagtgctatttaccagcttgggtttatatgatagtaagaaggttctagaggctctggtcttcagaaaattgctattgcagggcatgagaaaaatggttatgctttgggtagaagctcaacttccaaagtaaacaccatttaacccacttctgaggacaagggaaaaatgtacgaaatttattttgggggtaatttctttatctttcatgtgcagtcgtgatatttatagagttttaagattaactcagataaaaatacaaattatataaaaatacaatttgttgctttggattcagtgactagcacctggaaaatagtatattcagaagatgtgactaaaattttggccagtttcccctcttttgatcaacaaaactcattgaagagtattctcggaacatagtcatttaacatatttttattaattgtggaaaatgacacacatatacaacaaattttataaaatgaaaaatatatgcttaattaaacattataaatccagtctactggatatgtagtgagatctcattcttgttttaatttttatttcttttttatgatatgattgagcatagtagaatgtatttattatttatttgagagtatcttgttttgtgaaatagctgttctcttactcttttttaatgatgaatgtacctgttttatattgatttatcaaagtcatttatatattttggaatgtatcttgtgttggttataagtagtacaaatgtcttttcccactctgtggcttgcttttttactttcttttttttttttctttgagatggagtctttctctgtcaccaggctggagtgcagtgtggtgcgatctcggctcactgcaacctccgcaactgggattcaagctattctcctgcctcagcctcttgagtagctgagactacaggtgcgtcgcaccacgccaagctaatttttgtatttttagtagagacaaggtttcaccatgttggccagaatggtctagatctcttgaccttgtgatctgcctgcctcggcctcccagagtgctgggattacaggaatgagccaccacatctggctgcttttttactttcttaatggtattctttgataattggaaagatctttaatatagctcacttttgaaatttttttattatgaattgtaaattttgatggaactatagtcagaaaacaaatgctgtataattccaatttttaaaaatttgttaaactgctttatcatcatcatatgatcagtttttttaaatgtcttgtgcaaggtttaaaagaatgcgcattctttgtgggtctagttttccatctatgcctgttatgtcaaatatgcaaattgcattattcaaaactgctgtatcattattgtatttttttttttagcaacagttgtgttggctttactacaagtattataggtatatccatttgtccttgtagttctgttgatttttgcagtatatatttttaagctataatggtaggtacataaatgcttaaaagttgtaatttactggtgaaattagtcttttattactagggggtatttttctttattccaattgttttctccaggagggttggtaaaaattaccaagttaaacatttctggaataaaatatcttcaaataaactctgctgggaatacatagtttcttcttgcgctcactgagagaaggaggcaatcaggtaaatggcccttacagtatagttttagaagtattgtagcaaaacatggcattctgtgatagcccttagaaggtcacttaacccagacttagttgacaagggcatttccagaagaggtggcatctgaactgggtttgaaagtatgtaagagttggccgtgacaaaaacaggaatgaaggcagaggggggcagaggcaagggagtatatggttgcttggggacttgtatgtttcagctattaagtgtgtcaaaaagtctgggaagaaaggaaggagtttaaaatggacaaaaatatttctaattgtttgctatttcaaggtgtttttaaatgttgccaattataaataaataacactgcagtggagaactttgagcattattctttgtccttgtcccctactagttcttgaggacaagtttcttgaagtagaattactttagcaaggggtacagaagattttacacacaaaaggggacatctaattcaagatcatagaaggcttttaggaataaattacggtggagccaagttttgagggatgaatcagagttagttaagatgaaggtaaaacataaatgctgggaaatctcatgagcacagaggagagtgagttgaaggaagggtaaataatttcttacgggttggcttggtacaaggtctggtgagtcatgttgacagagtgggcttaagtgcaaactaggattatacttgattccatcaaagagctttagttaataaaataatgaaatgcctttttttcttattcttaccttttgaagttcctggaacccatttgtaccatattccccaaataattataatgattatctttcatatgccagaactcattttctaccatctctccaggtgattttagcatctggaacacattgtttccccttcactgcccaccatcatactaagtaatgcctgcttccctttacttcttttctattcctccatatccacacgtcctaggatggtacttattaagtctaaggcccaacttcgccatttaacagctgtgtgattcctgacaagctacttaacctctctttgcctcagtttcctcatcagaacctcaactgtattcatcataaaattgtgagaattaaattgtgcatgtgaaaatatccggaatgtctttgcagcacaatgacaattatttttcctcccattatgaatacataaatttgcccaggtttaatatgcctcttagtatagtttagagaagctttacaaaggtaaaccaaggatgagctgcgtatcctgagcatcttctgtctcagaggtggctaccctcatttaggggcaaagtccacgctggagagagcacctcacctttctttgattgctagattgagaagaaaatgaggatctcagcctttaaagctttccatttatcagcttttacacattcaagaagcatttcatttttatgttgcaatagcatgtatttccttctcttaggtcacctttgccttctttgtacttagtccctattcttcatctttcgttttctctcagttacaaaaaggaagccaaattctggccattgcagatagcaaaatatcacggcaggctaactaattttgcccagactttctgcgaaagctccacatgtgctgcagtgttgggttgcataattgatttaatctctaattttagaggaacgctgaactctttttgtgggactctgcatacatttctctagggcaaaaactgtcctacttttttctctctggtatctctttagtgctaggccacttttttttttttttttttttttttttttttttttcccaaagactctaaactaccctccgtgaaataaatgaaatcacagttggaaaacagcttactggacagacttgtaatggcaagataacagctacgccatacacatttactaaacattttcatcctcccctgcttcccttctttctgctctagcacatctttattttcactaagatgatgcatcaggctctcagctgaggagtggcattacctacacagaggagcaacacacctttgcatattattggaaatacataggcttgctcacccattgacctactatatgcctctaggcagatttacttacctgtctgaatcttgcttgctttcagcagagtactagagtaatggctgtgaaggctgaactataaaaataggtatgtagcaagctttagacttaccttgtgccttttggctatccaggtatataggaagtgtcagcaaggggggatgattttatgttgctcaaaagaccagcaaccaagatgaaaaccaggcaattgtaagtttactagttatttcacattgtatttagcaatgtcatttttggttatcttttcgggaatttatatactgggaagtcgcatttgatagccggtggtttttattaacctgtctgatttggaatataattttgggattaccttcccaccagttacttctcaaacaactgactttaataactttagtatttttgtactctaagacatatgttccattgaaactaaccttcctcaggtccatactcactaacgctaatttgacaaattccctgaacaattctcataccatagaagtatgaattttcataccaaactccactgttaacatcaataaaattaggtcagaaagaattccaactgctgtctgagtatcatagccttatgtctttatgagtctttatgctgctaaaagaatttagttttagaaaataacctcttatctgttaaataaacacttagcataaacagatctgtgttcaaatagattctgttacttaatagttggatcaatttagacaagtcccttaacctgtaagcctctttatgtgcaaatatttaaaactgggataataattatactgacttctcaggtttgttgtgaggagtaaatgctaaaatgcatataaagagatttgaaggttatctagccatagacagtgtatcaggcaggttttgccataataatggtgtgtaacaatccccaaatctcagtggtttacatcaagaaatatttgtgttagacttagttgaacttggctccagcttgtgcattctattcaggtttgctctgcatatctcttcattcagataccacaggctatttaagaaattctgtattcatggtagagaacaacattgaaagagatctggtaaaaaatgaaataaaacaaaacaaaacaacttgccaagtcccttaaagcatcaactgaaaactaatattcctaccactttcacacaaatttcattggtcaaagcaagtcatatgaccaggataaatattagtaggtcaggaaagtttacactgccctaataaagaaagaagagtgaatacctggtgaataatacatgagtctccttcaaagaagtttactgaatcttttttatcctactcttatttcatctgcatgaccattgactcctccatatagtctacttcacagtatctacattgcattattgaaattatactgcaatttctccctctctttcttttaatttcaaattgatttgaatgatatacttttctttgtaaacaggtactttagaaaatcccttagaaaaggaacaaaagcttctgattctccttagagcctcagagggagtcttttgtgaccgtatgaatggaattcatattgacccaggaacaattggtaagagtataatatagtttttattaaaaataaaatgcatgtgtgtgtattgtgtgcttgtgtctgatagagaaatactattcatagaacatatgctaaattccaaacacccttttaggcaatttatatttattatttcacttaccagctctcttgtgagtagtgtccattttagagatgtcaaaactaagactcagagatgatgaacgacatgcagaaaaccacacagctttatagtgtcagcattatggattaagatccagattagtcagacactaaagtttcgactgagtcaatattatcaactataaatactactcgattattgatacatttatacaactgatagatctataaattaataaggaacattcactgttgacaatttctttatttgctattgccacaataccaaatgctattttaaattggtctatgtaaaagtacagaaacggggactggccttgtataaccatatgtatgtatccccaactaactcagttttgaggcataagagaatgttcatcagatttaaagtattttctcactttttctatatgggcattactaattttataagtaaagagggataactcttggcatgaagcaattttcttcaagaatgttcatttttttggttatttttcccttacttatataatagttgaaataagttcactatactttattactcttttagctattgtattgtcacacagcttaaatgttattatatttaaaaatatgttattatatttaagctgtgtgacaatacaatagctaaaagaataataaatatgttatcatatttaagctatgtgacaatacaatatctaaaagaataataaaatatagtgaacttatttcaactattatataagtgagaaaaaaattaactaaaagaaaaaatatgaacatttttaaagaaaattggttgttaattttcttggattctcccttagatgcattgctgtgttggaggttttcaagtaagtcatttttccttgtggaaaaagagcaaggaccatcatttctgaggtttctgaacactatgagatataaatttaatattcattagcagtcaatggctccctctctggatctcagtactcaatagagtggaggcaataatgttaagctagtatgaagtttcttaacttagttccataatatataactattgtcatataacactttgatagcactttaagtttccaaaggttttttccatgcatgctatttattttatctttctaataacaagaggttcaagaatgttttaatttttctaagttgacaaactagatggattattataagaatatttgatcttcttttgcctgtggtattcactcttttctgtagcgtgataacactggaacaaactttctgttaggactatccacagatgcctgctctgatccccgatcctggctgtacggtcaaactagtgtctttgaaattttctttgatactaaattgaaataaagaatgaagtatttcttttactgcatgctcaaatttttgtagtatcataagtagatgacaaattttaatcgtattaaatcatttgtaatcttcttgaaacaactaagaaatggtgtcattttacagtaaacctttgatgattggaaatgaccaagaaatctgcttttctggtcaattgaattttctggataattcaaatttaaggacatgaactgctttttgttataaatgctttggttgaaaatctctttaaattacttcaggatccttctcagcctagcttacttagcctatagtgaaaaaagatggattttggttttagatgatgatgtcttatgaaatatataaatgctattatgaaagattggtttcaggacacgtcctgaaaatggggttctttttatatccatttatcctgatttagttttcttatcttctgacattttcatagttgatatatggaaaaaatgtggatgttgatataaacagttggttaagttctaattaattgggattattttttttttggtccttatcagatgaacaccaaagtcatattatttgtaccttagtggtctcctgcttcttttatttctatgttttctgatgaaaattgtaaaatttttaaatttttagattaatgacttgcaataaaatacagtgcatcaatccagggatatgcagacaatacatttgggtgcaggaataaaatattagaacttctattccaatatatattagtatattcatatatgtgtatattttttatctaaatataaatatctgagttatctaaataaaataaatatatatgtgctgagagtacacaatcacatgttttttctttttctggtgaggttcatggtcaaaacattttaaaccactagaatatgaggaattatgattgaaaatggcaataaaacatataggaagaaagacatgaaaaaataaaactgagctgtatcaagcacatttctcctaagcctttaatttattagtctgaaataaactgcattttgaaacaaaggacttagaaatctctcccttgatatttataagacaaaatattaagtccagccactaaacataaagctaatagctccaaaactctatcctaaggaaatagagttaaccatgcttttggagaacctagtgtgtaacaaaaaatatcaaaactggttaacttccaaaagaattgcaaatggtttggagtcacgtaagagtggaaaggagtacctcttcaactttagtcattagagtggtctattttcccaccttttagattattgtgatgtggtgtagcattcttttttctatagcatttgagagaataaatttcatagccatgtgagatatatcttagtattgtaaaatagagcatttaaataatgcttttgataatatgggaccttcatatagagattctatatcacatgttttgcacaacagcctctggaatgacttttacttacctggctttcattcctctgaaggatttttctatccaactgttactccttttattttcaggggtttatgggaaagttcatctttacagtgcttatcctaagaactcctggacacatcttggagctgatattgcctcaggaaatgagaggtaaggaatgagagtaacttagggctttttcttggttgttgtttaggttgcttctgcttgagattttgttacaatatgaaactgatttttaggttaaacattataattaaaggatgagcaagtagaaaaataagcgattatagggaatttaaaaaatatctctataacataacagaaggagaacaaaacatgcaaaaggtaatagaggaacacagtttatttcaggagaaaattttagataatacataattattgctgtccataaaatcttaaaatatatgaattccatgagataagagatgaagtatgaggtaagaatactatgtctaagctgaaaaggtacctcattaagatatagacagaaataaaataggagggagatgaaacatatgaagtatattgtgaaatttaataatgcattggaggcagtaaagaacagagtcattgcttcctcaaagaataggtaaaatgaagaacaaactgatggagacctatccaaacacagaggataagactaggaaataaaaataacaaaagataaagtactagaaatagagatcagaaaattaaaagctatctatgggtcatatgtctttttagtaagaactcagaataactacaacagaaagaataatgaacactataactgaaatacacatagaaaatatgggaatagttacattttattagaaaagattaatatcaaggatggtgattgctttattacattatcttcatagtataagaaaaatagagtgaacaaaaagtaaaggaaaggaacatcaagctttctagccttagcattcacctctacaccatcacatgtgggaagatcgtgatgccacatctataaatgtttaaggaaaaaaatattgtgaccaaagaattggacacactgctaagacgctcatgtggaaaatggaagaaaattcagtgttcaaataaagagattaaactaaacttaaaatttgggaacagaaataaaatttgagaataatataaataactaagaagcactgaaataatttaaatattatagtgtaactatggttattaaaacaaaacaaattcctttttttttttttgacacagtctcactctattggccaggatggattgcaatggcacaatcttggctcattgcgatctccacctcctgggttcaagtgattttcctgtctcagcctcccaagtagctgggattacaggcacacaccaccatgcccagctaatttttgtacttttagtagagatgtttcaccatgtcagtcaggctggtgttgaactcctgacctcaggtgatccacccgtcttggcctcccaaaggcctgggattacaggcatgagccaccgtgcctggcctaaaacaaattctaataattgttcttgtaaaagaaatgacataacacttgaaaagttaatgtattagttggagttctctttatacaaaaaatacataatcagtaggttatgtgcatgtgtgtgtgtgtgtgtgtgtgtgtatcctacctgttatatgtatgtaaattatacaataggtatagtaaatattaatatacatacatttatatataaagagatgtatttcaagggatagatttacacaattatgggagctggagagtttgaaatctgtaagcaggccagtatgttgtaaagtacggaagaactggtttgccgtcttaaggcagaatttcttcttccccaaagaaatctcacttttgcttttaaggtcttctggctgattgatgaggcccacccacattattgggtggcctaatctccttaaactcaactgtgttaaccacattgacaaaataccttcacagtaacacctagattagtgtttgattgagtaactgtgtataatagcttagcaaatatgacacataaatgaatcttcaccattcaaaattatcagataaaaatctggaactatagccataggaggtaaatatgagttaatttgttttactagaattttgaatagcatatatactttccaaatcaccagtgggaaaaaaatgaaagaaaccataaaataaataataaaatagaaaaaaaaagaaaatgaaatggtaaaagaataaaagcaacaaaaaaggtatatttaaaacaaacagaaataagaaagtaagtacaaatttgccagttacagaaacaaaatatttgttaaaaataatgctatatagaaaaattgggttaaaagtcaaaatataattataacttttttaccagaggaaaacttaaaaccaactaggagaaatttaaagttaaatattggataagaataaatcattgacatctaaaacaaaataaaggagcctcaaaattattaacaaaacaggtaaaaatcaaaataaatgtttcaaattggttaaataattataatttacattagtaaagccttcaatcatagcaaaacactaacagtcagaaaagttttacagcagataatacaatatagaaatataaagcaaatctctaggaaatgtaaggtgaaattgacagaaacaaaaatcacgatctaagacacgtatttatctctttcagttccaaatcttttaattaggttaaaaaaggtaaagaaaacaagaagaacatgaataatataataaaagcaatttaatttatgtatcaaactactcctttaccctaaaaaatatatatccataattaccttaataaattttaataataatatgtgatcacaatataataaacatggagattaaaataaaatataaaccaacaatcttaatttcttacaagaaaaaaggtataataaattatcttctaaataacttttatatccaagaaaatatcaaaactttaccaacagaatagctgggaagtaacaataatgagaatatagcgtacgagatattatagaacatgtcatcacattaaatactttcatgattgaataagcaaacaaacttttcttattgacagttttcatattgacagttattctaaacaaaaaattcttctaaacaaagaagattaactgtcaatatgagaaattagaaacaaaataacccataagtctaatgaactcaatcaatgcaagaaaaaggcagaaattggtgaaatagaaagtagaaaattagtaagattaaatttttaaaaagaggtagtggtttaatctctaataactttaatcataccaagaaaaccccaatatataaaatgagaaatgacagttcaaatgtaagtacagaatagtttagagttataatgtaaaaaatataaatctatatagtgcaactttaacatttctgagaaaaatactttataaaaaggaatttttaacgataatttagaattatcataattggctagagaagaataaaacaaagaacaaggaatagtgaaagatataaatttatcaaagatttatctccaaaaatacatttggctcacataaatttataccatgttcttccaatcagttgaatatcaaataattcctatgttatataatctattcccagttaatttaagggaacaggcctaaaataatctttacacttgtttatagctactaaaataactcaaaaaagaaaactgagaaaacatccaaatagaatgtaaaaaatcataaataaaaaagcaacaaacaaagcaagctatgtttgaatgtgtttcattcaagtgaacaaagataatttgaaatgaaataatccattcatataatttaccttaataccagatgtgaagattaagaacatgaccaatttggcacaaaaaggaaatatgtttaataaaattcagcaaacattcttggaataaacagtaaatgaagactacaaggatacttcttttaaattaatgctatttatttggatggtataaccattagttgagaagcactggtttaagtaataatacaaaataaacattaaaggattcctctcaaacagttttgtattttaggagaaaaaccgacattaaatattatcgtttgttacaacaatcattaaatattattattaaagttttagccaatatattcaggcaagaaaaatacattagatccaattattgaaaataatccaaactatctttttatgtggtttataaaatggatatttcatcctataaaactagagaattatctgaaaaactctcagttgccttcaataaatgcacatcaacatctttttaatatacaagtagtaaacttttaaattataatgtacaagcttatttaaaatttcaactgcaaatatctagaagtaaatttaggaaaaattacagaacctataaaaacaaaactataaaacactattcaatggcataaaaagagttcagaataaatggtgatgcataacaaaaatttgatggttcactattttaaagatgtcaaatctaatacaacttgaatcacaggtctaatgtatgcatcagaatctgactcattaaattctttggaataataaacacttgaaaatagccaaacattactcatctgacaaagggctaatatccagaatctacaatgaactcaaacaaattttcaagaaaaaaaaaacaaccccctcaaaaagtaggtgaagcatatgaactgacacttctcaaaagaagacatttatgcagccaaaaaacacatgaaaaaatgctcatcatcactggccatcagagaaatgcaaatcaaaaccacaatgagataccatctcacaccagttagaatggcgatcattaaaaagtcaggaaacaacaggtgctggagaggatgtggagaaataggaacacttttacactgttggtgggactgtaaactagttcaaccattgtggaagtcagtgtggcgattccttggggatctagaactagaaataccatttgatccagccatcccattactgggtatataatcaaaggattataaatcatgctgctataaagacacatgcacacatatgttaattgcggcactattcacaatagcaaagacttggaaccaacctaaatgtccaacaacgatagtctggattaagaaaacgtggcacatatacaccatggaatactatgctgccataaaaaatgatgagttcatgtcctttgtagggacatggatgaaactggaaaccatcattctcatcaaactatcacaaggacacaaaaccaaacactgcatgttctcactcataggtgggaattgaacaatgagaacacatggacacaggaaggggaacatcacactctggggactgttgtggggtgaggggagcggggagggatagctaaatgacgagttaatgggtgcagcataccaacatggcacatgtatacatatgtaacaaacctgcacgttgtgcacatgtaccctaaaacttgaagtataataataataaaataaaagaaaagaataagaggaacatactgagggacaccaaaatatgataaatcaaatgtaactaaatataataaaaggccaaaaaaaagagaaaatagccaaacattagcatttttttttaaatgtatgcctctaatatgagtaatctgttgttggcaccaaaactaaaaagaataccaagaaataaacacagtcatgcattatttttagaatttgaataaattagcatttgaatttagttgaagacaggctggaataattagtaaatcctttagaaaaatataaaattagattcccactttatgttttactctaaattataggtggattagaaaacaaaatgtaaaaaagttaaaaccataaaattatttgaagaaaatttaagtaaacatgtaatttaaagcagtaaagactgctctgatcataacaagcaaaacaatagccacagcagtaaataatagatttgacaatataacaaggtcaatatttctgcatgtcagttacaaaatgtgatgacaaatgatcaactagaaaatgtttgcacccattaactcgtcatttagcattaggtatatttcctaatgctatccctccctgtgcacatgtaccctaaaacttaaagtataataataacaaaattaaaaaaaaagaaaatatttgcagcatacaatagtacagatgaaggactaatattttttatatgtcaagaatgaaaataaaaatatgaatacaccagaaacatatttgtgaaagggtttgaatatgtaagccacaaaaaaaatacatcttgctaataaacatatagaaaaaatggtcatctttactagaattgaatattaattaaaacagtaatggaataccatttttaaattttaatttggcaaagatggaaaatagtgaattccaagttgacaaaatagagcagaggctcacattcacatgggaattaatcttacatactagcctagttttgtagataaagaaataaaaatatgtatgcatatacataatagggaaatccctggaaggacatacagcacagcaaggatccctgttggtgaaatgataggtagctatcttgataggtatgctttggtgtgcttttctctatgtacagaatttctttgtagagtaggtattatgttcatggttatttaaaattatttatttgacatgattttcacaaatgcttatgtttgtcaaacattgagctatgatctggagatataatattaagtaaaaactcaaacgttaatcaaatagtaaatgtaaaattacatacatgataaattctgtgaaggggcgggttatgtaggattctgaaaacatgaatatgtcaacttgaggcatttatgggaagttggagaaggcttccctgaagcataatttcagaggtgggatctgaaagaagcatggacattaattaagcaaagtgggttatatgtggaaacggtgttctagccagagcaaacagcattcaattattaagcaaatatctgaggaatatttactatgtgccaggtcagactgtaagcactagacatatagaagagattgcaaattagaagagattgctgccctctgggagctcagatcttagttgagagaaagacgatactcaaacaaatacagaaatataaatgacgtggttgagattataaaatatgctggtaaggaagtcaatatggtgatatgatcaaaaatagctggggcagaaaatgtgaagggtaccattttagattgaatggacagggaaagtctctttgaggatgagaaatttgagcttatacctgaaggatgggtgggaaccagctggcctagggtgggggtaggggggaaacaggaagaaggtcactatagctggcgcagagtgagcagagggcagcattgtctgatatggcaagtgccaagtcatacaggaccttgttcaggtataagaggtcaaaggggaaatcactgaagggttttatgcaggaggatggtggaatctgatttttgtttaaaaaacttctctggctgtgtagatgatggattgtggagataacagtagagctgggatatcagttaggaggccagttgaggccagaaatcatgtatctgggactctggaagaggcagtggagatggagagaacaactggtcctcctgatgactgcatgtggaggcaaggaaagagtgctgcaggtgttttgatggagcacactgatgaatggaggaagcacgcactgagttgggaagactgagaggggaataggtttgtcagggtggaaggcagcaggggcatgcgaagttggagacaccaagagtagatgccaagaagaaaatcagatgcataatttagggcttggaagcagccatcttggaagtaggtgatgtcattattgaagaagacatgggtagaagagagatttggagcatgggattgagattgggggcattctaactttttagatattgaggagtcaacacaggtgattgagaagcagagggtggagacgtgattctgtggttgggagggagaatggagaacatgagggtctgaaagaataccatgatggttgatgtggagagtaggggctgatcatgacagggttccaaggagttggttaagtgtcagggccacatacattggcaatatcaagaattttaatccagtctatcattgttggacatttgggttggttccaagtctttgctattgtgaataatgccgcaataaacatacgtgtgcatgtgtctttatagcagcatgatttatagtcatttgggtatatacccagtaatgggatggctgggtcaaatggtatttctagttctagatccctgaggaatcgccacactgacttccacaatggttgaactagtttacagtcccaccaacagtgtaaaagtgttcctatttctccacatcctctccagcacctgttgtttcctgactttttaatgattgccattctaactggtgtgagatggtatctcatagtggttttgatttgcatttctctgatggctggtgatgatgagcattttttcatgtgttttttggctgcataaatgtcttcttttgagaagtgtctgttcatgtctttcgcccactttttgattgggttgtttatttttttcttgtaaatttgtttgagtttattgtagattctggatattagccctctgtcagatgagtacacgtggacacaggaaggggaatatcacactctggggactgtggtggggtggggggaggggggagggatagcattgggagatatacctaatgctagatgatgagttagtgggtgcagcgcaccagcatggcacatgtatacatatgtaactaacctgcacaatgtgcacatgtaccctaaaacttaaagtataataaaaaaaaaaaaaagaattttagtttttaccctaagagcattgtgaagctgttgtaggtttttaagggggtagtatggataggaggtaacacttattatcatacttgtacatctaaaatattgtaggcagaatgtagacagcaggagagcttgatagtagatccagagacacccagcaagagacagtgtaattgtagtcaggggctgcaggagcaatggagaagtgggcagatttaaaggcaggagataaaccctataagacacattgaatatgaagtgcattcttggtttctggtttgtgtagctggatagtggtgtcattcacttgaggaggactaagtttagagaaaagattatgaattcagattaggtcatgttgaatttaaagtgcttttctgatattcaaaaggatttgtgaagtaagcatttctaacaaggatcaataagaaactttaattataattaaaaggttagcaagctggaatttggcaggaaccatatgaatggatttttcttataagaatgtgttaaaaacctcatttggagtctgagctacaggctattttgaaaggaactcaattttattaattaaaactatccatagtcattaactagctaccatttatttggttcttatcatgtaagcttgttatatgtcaggcctctactaagcattttacatacattatctcatttaaatctttcaatgctataagttaggtattattatctgcattttatggatatgaaaactgaggctggagaagttaagtaaatgttccaagttcataaagctagaaattcctgaggctggatttttcaccctgatttgtctgattccattgcgtgtgttctacatattacaaatattaaaaacaaagtttcttagtatcagtcctgaggagaaataatttaatgagtttatacaaatgatgtgcaattaatgtagtatattcattttatggaattctttctctttaaaaccttttttaaaatgttaaaaataacttcagactcaaaataagttgcaaaaatagtagtttacatatacccttcactcagtgttccctgatgatagcatattacataactatagaacattagcaaatctggcaagttgatattggtacggtattaactgagctacagaccttatttaggccacctttttaaacatggctctacaatcttaaaagtcaattcaataagtctttgtctttctaatatattgtgatataagcatatttcagatgaactgtttcatgaattttcaccaaaagaatttgatacctgaaaatatatatatatatatatgtgaataatggtagtgtgaaaacttcggaggaaaagtttcatgttaactttataagcttgtatcttacacaatcaaccaaagtaagcttagcaagatattttgaagaaaaattattttcttttattctgtgttttatcaatttatctctaaattactctctgttgttgcttgcttgagttgacttgtgaagactgatgaacaaaactgttgaggttttatttggattgtaaataaatcaagacaagttagatttagacacaaaaaattgcttttacccattacaaatgttatgtatatcttttgctgtgagtctttgaagggtagccatgtgatctttgaaattaaatggttactttgtcaaccaatcttatgataaagattaggttttatcttggccattggaagattttaaacgagacatggacagagcctgacttatattttaatctgatttatgatgtgtggagaattgactattggtggtggtgatgaggaagagataagagtggaaatagagacactaactgttaagacattgctatggcagttttttgggtaacacatgatgatggcttagattaggatggcagtgatggaggagtaaagatgtggataaatatatgttgaagacagaagtgacatgactcctgatggactgaatattgaggaaaagagaaagagaagagtcaaagatcactcttaaatttttgacctaagaaactaggtaaggagcgctgccatttactgagaaggggaaaacagggagaagagctggattatgaggaaacttcccccaaattcttatttttttctcatttcttatctcattgaattttcaagaaaatatataagacatccagtctctttgtcctgttatcctttctttctcaagtgattgacttatttcgttttattttttaattgacaagtaaaaattttatgtatttatgctgtacaacatgatgttttgatgcatgtattgcattgtggattggctaaatctacataattaacatatgtattatctcatatagttatctttttttgtggtaaggatacttcacatccacactcagcatttttaaagaatacaatatattaataactgtagtcactatgttgcacaatagatctcttgaatttattcttcctatctaactgagattttgtattcttttatcaacatttcttcaacctttgcttccccccaccaccagccaaaccagcagcctctggtaacctgcattctactctctagtccagtgaattccactctttttgattctgcatgcaagtgagatcatgtggtatttgtcttcttgggcctggatcatttcacttaacgtagtgtcttccaggttcatctatgttgatgctaatgaccagattttcttctttttaaaggctgaatagtattccagagtgtatgtgtatactgcattttctttatccattcatttgtcgatgggcacctagattgactctatattttggctcttgcgaataatgttgctgtgaacatgggagtgcaaatatctcagacatactgatttcatatccttggaatatatatctagaagatggattgctggatcatattctatttttaattattgaggaccctccaaactcttttctataacggttgtactaatttacatttctactaacagtatgcaagggttctcttctctttccatcctcactaacctttgttatctttcactgttttggtaattttgacaggtatgaggtgtctgaagtgatttattaacatactctgttatttacaaggaagaaactgtgaactgaataagaaatcaagtcatttgttacctcatccttttctccaggccctaaacctttaaattgaatgtcataattgattatatctattcctttatctcctatgttaaattaatgatgtgttctttgtatatattttgtttggaatgtttcttttttctttcctatctgctacattctcattgcagcacttcacccatggctctctacaacaacttttgtactggctccttaagtacctaataaatgaaataagagtatcagatgcagtattcttgcatctcctccttgactgtataacttcctatttatccttaaagattccattacatcagacacaggactttaggtatctccgactctacaaattttcccatcatctgaacgtaagatgtgattttatgatttgtaattttaagaaaagcataacactaagatgtttaacatttgtgtgtcctgttcctccaagtggcttctataggggagagatatatttttgttattgttgatttggtatattagtgtctagtgcacagcagaacataaagaagggctccaataaatgcatgctacattgacttgatgtgtattttctagaaatcagaacttattgagcttcttggttcaatggcatattatctaacaaatgagagaatcttgaatttaatttcaaatactactataatttattttgctcattcctcaaactttattattataacaacttagtttaagtattagaatatagagttggtggccttatgcactcattggcaagagttcaggatcacatatgtaacctctaaaagatgatgattttttttcatatgttagaggtccaataaactattgggttctattgccaaattcactactattatgatgctggtgaaaggcatatgtttggaaggtaggttggaaatatattctgcaatgaaaaggagtttgaactttgagggcaggcagactaattctagttaggtggttagctaaaggtgtaactctgagtaaattactctctctgagcctcagttttattttctttaattatgtgagtaacaatacattgctaatagaatagttataaggattgagggagttaatgcacatgaggtgttaagcccagtttctggcacagtgtaagccttaagacagggcagctattgtggcaatcggggctctttaagtcgaaagtacaagtaaaagtaacccttcttaagccattttgaagactgtatcaagcccttcctctcctcctctacttttttacttctttatttcaacctcttttttttctactggagaatagttttcttcattctgtatggtgcaagtgaactcagatctgtttggcttttcctagctataccaccagtgaggaggttactactaattcccctcagtttcattcaaaattccaggggaaagattttggtgaatgaatgcaggttggatcctatgcccagcctttggtgaagggtttgtgggactttaacctgcagctctcacagatttcagtatagtggatgggagcagttctcagatgaggtgtgagggatttcctggaatgaagcagagaggaagtcaggtagacaaataattggtattgactatagctataattgttgtcactcaccatctttaccagcatcattatagaattcaatttcttctctatcaagtgtagaataatacagtctgagaatcctcattacattttaatggcactgatagaaaaattttaaactgaagttacaaaatgaaaaagactaaatattagtagagttcagaaatctgtggccatccctattcctggaggtgcaggtgagacagggcatgttttgtgatatgtacactctgagcctgtggtcaaatgcagttattatcattaagatcttacaagtattaagttaacaaattcatttaagttgtaggtgtttacacgtgaatgtcttacacatttttgtaaaaacttttaaatcaaattttgaagcatttttaaattctctgtaaataataagtattatatttttgtctagtaaatattatttttctctgaactaggtcaaaagttatgccaaaataaagaaactgtactgatattttgtttatattttcttagagttatctttaaaaagacttccacagtgattattcataatttcctctctcttctcatatggtttccatttaggtacaattatgttgaaaaaaagtcttttaattttttgtttatttattatttgaggtatgttttgctcataacaacaagcaagtctcccctcttccctgaagatctaggagtcatactaatcagaggaataaaatacagagaatacagctgggattttgagccagtcgttaagctagttcgtatgattgaagggtaaccataatgtttgaagactggaactaggaatagtggatgttggaatttaaggaaaactgacatttgactagcagaaccaactaggctattgatactgagaccccagtttcctctgaagttaccactgttgctatatggacatagacgtggaaggggcaatgctcctttgacatctgtgtatggttctcatgatgtatagaacccgaaagacttcaggagtatagaggaaagatacattttaatgaactcataaggtttgggaagccagaacagaaaaggtcagattaagtttatttatgtttttaatataaagtttgaactaataattttaataattcctagaacattgttaggtgctatggggtttagatagtgatttttttcctgtttgctttgttttctctctctctctctctctctctctctctctctctctcttttggcagggtctcattctgttgcccaggctgctggagtacagtggcatgatcatagctcactccaatttcaacctcaggggcctaagccatcctcccacctcagcctcccaagtagctgggaccacaggtgtgtgacatcatgctaggctacattttttttttcttttcacttttgtagagatgggatcactctagttgcccagactggtcttgaactcctgggttcaagtgatcttcctgtcttggcttcccaaagtactgggattataaggcaagaggcactgtacctggccttatatagtcttatttttattaaatatcaatgaacaataaaaaagttgaatggtcacagaagacaagaatacaaaaccagtcacaaggcaataaacagcattttttatgtcaaattgatggtggtacagaaagtggggaggctttgggcattcagtggaaagagactcccattgaagacttcttgaaggcatagtgaccgtagtgacttgtgtcagttttcaagaatgagagacctgaagagcaaagtaggggagagtgaactgattcatctggctggagcagatggcttatataaggaagttagaaaatgaagctttatgagttttaaatttgcattagtgttcactcaatgttaaacagttctatggatttttacaaatgtgtgatcgtgtatatgtactcccatagtattacacagaatattgccctaaaaaatctcatgtggatgagttttaatctcactttcacatgaaacttctcagaatattatagtgacctattatttgaagagctttattcaacaatataaataataataaaaagattgtctaggtcaggggtccccaacccccagggccacagaccagtacagatccttagcctatcgggaaccaggacgcacagcaggaagtgagtggtgggcaagggagcattactgcctgggctccacctcctgtctgattaggggtcattagattctcataaaaatgcaaactctattgtgaactgtgtatgtgagggatctaggttgcatgctccttatgagaatctaatgcttgatgatctgaggtagaacagtttcatcccgaatccacctcccctgtggaaaaattgtcttcacaaaactggtccctggtgccaaaaagcttggggactactgagaaatactaactatgaagtaaaggattaatttcaattatacagcagattgacttttttttccctaactacaatatactacctgataagttagaaaattgagatttaagtgaaaatcactaataatcccaccatccataggtaggctaacattttaacatgcatctttcctattttctgtgcatgtatcattttattaaaaaatggagcatattattttacgtcctgctttttgaaatcaatacatcatgaacaaaatttcttgtaattcagtgctcttcaacaaaatactttaaaaatggctatacagtattccattgtatggatcatagacttcttataatttcatagattatgaaaagtgggaatactctttttctaataccatttagcacctgaagaactaaaaataagacaggcaaagtgagattatttagtggaaaaaatgctggactttatcagtagtcttcctttgtcctaattcaatcactggctccatgtatttatctagtcttacattttgttatttaaatctatttggaacttagtttccttgcctttcaaagcttgtggtgcttaaatattctgtaactgggagttttctaggaagtcatagcaaatcaggaacagagctaagactctaaattccttcattaaagttgcatcaattgatagtagtttttttgtcttctctatgactctttctccaaccttaggtacgtagatgtgaattaattataatatttcatttattagactcatgccattggcttgcaaatgattaggtttaatttatgtttccttttaggggcttaatactatatattaaacatctgtattattaatatgtactcccatggtattacacagaatactgtgtaatacacacccatacagtagactctttaaagatatgtgctaggcagaatttaagttatgtattttaatacaaatgacatatgttttatttatcgtatgtctctagcatctactctattgtctggtgcataagatttgctcggtcaataaaggttgcatgattgaatgccctgcacatggacactgttgtctgaatgaacattcactatagaggagactctttatcaaagcttgctaaactttgggcattagctaatgaagcaggcaattaaatttatggtgttgaagttggtaatgactatgaagaaaataaaacagtcatattcagagggaatgctaggcggcagtgaaagactgaacagaaactgtattaaatgtgtgtcttgaaaaataccaaaaatgaacacaaccctcattgtttcataatgtgatgaaagagaagacagaaagtacaaatatagccttttcagatgaggatatgaagccgaggagtgaagtgacttctcaaggtcacacagctggtaagtgacacctctacgattcacacttgtatctgtttcatcatgaaggtaggatttgtaacacatgatgaaaagttgtccaaaatgtccaaagttgtcaaaaaatggcattatatttctctagaaaattagagaaaagttcttttctgaaatgctgttattattgaatctgttccctaatccagaaagaaggttgctgatgtagacatgtgtactaacctctggaacttttattgttttttattcctttgctgtatttcaggggtcatcgaatatcttcactgtctctgtaacatatacattttcaagccagaaaactgactccattagctaaattaaactgtttgcgaaagcctttttccactgccatgtcttatttctatttcagtttctctggtgggatatgttggtcacagtggatttccttttcttgctctggagttaatagatgatttgtgctgcactgttagtatatccaatgccattgttatgctgttacagaattatagtagaagatgcagtggattggcgcccccatgacaaaatagtccttagctcctcttcttatgagcctcatgaagcagaggtcctcactgtgaaagaagtcaagggccaccatgtgaggatctatgaacggctcaaacaccggcatattggtaaggctttggtttgttggttaaggtaagtgaatgagctaggaagaccatgtttggtaacctagctggggacctcggatctgattgccattcagaggggaagaacaatgccttcctgttgacctagactcatgctacgtggccttatctctattccctcattaattttgttgctttatttttaaagaatacttggatgttatacacatacacacatacacatgcacacacattttgctttttatttataatggcaaatctaagagcagaagggttgagagtcttgttcaaggtcactgggcagttttctggctaagccagaataaaacttatgggcactgagtttccagtttatttcctgacacattgaattataatcccttagaatattgtagttactgtaaataatgatttcattttccatacttagaaatgtgtccttcctgacatgaagtacattttatgtattaactactactattactattactgcaaaaaatgaaagaaaaaagcccagacctttttttaaataaaaaaggtaccaaatatttttatacacaatacacagttagaatgtactacatataaataataaatcacaataaccttcctgattcagtctaataaataaatctaatccaggagatatagctaatcagtaataaactgtggaaataaaggggatggagaatgtctttttgtctctgatacttgagaggcaaatccatggtttcaccaggaatatctaaagctctgtctaaatcaatgttcccaggagcatttcttttttagtaagtggcaaagaaaaaagaaatcttcagcaatgatttcagtaaaatgcaaggtgaaatgcaaatggtagacagtgaaacaaactagcaagacgcttagttcccactgctgtggaagctgttcaggccgtgatgagtggaagatccaccatgagagggcgctgctgctgcctggtgctgcttctcgctttccttttacacacagctgcttttgctctgtcactgcctcagttgatgtgggactcctcactctcatgaaagaggtccacggacaatgtacaacccaacactgaagtctcacgctgacctatttaaggcaggttggggaccccactaattggacaggtctgccctgacttccctgaaccagtgacctgttccagtacccacagttattaagaagaaatgaattcttgctcaaacactctgactctgatcccaaagagagacaagtgaatgggttattttatttctcagctgacctttgtggagaatgccccaggaaaagcagaccttaatgttggtagaacttctgaggggaaaggatgttttcatttctcaggtttgctgggtccccagctagtgatttttgaaacaggtttttaaagtttttttttcccacaactcctattgccccaggaagtgtacatgtcacggaggatggccgacacattcgtttggctgctgaggttggactgttgacccgaaatatacaaattcagcctgacgtatcatgtagggggagactgtttgtggggtccttcaggaagtccagccgagaagaattttcaggtaaatgaaattttaagtaattggccattaccagttggagcctattcatctgggacacccagaaatcccaactgtgagaattttcatttataaaacaaaatgttcaaatgagatagttcctttgtgcttggagaagctatgaattttcagtcctaatctgtgcttaattatcagtgtgatgttaaaataatatactagtggtcagcacatatgcacattttacctcaaagaaaacatcttcagcagatgtgaaatttccactgctttgaaattatagatgatttaatgaccacttcaattttatctctttcctgaatttctgttactctttcccagtagcatgctatatctgatggcaggcatcagttcatgctataaattaatagcgtaaatttaaataaaaatgatttccatatttcagactgctttaaggatcagttcaatctttcttgtttctttcaagttttagcccttttggaatgctgcaaaattatttgattaggacctcgtttcttaaacttgtgttccttatacattattccaaagttctttcctgatcaaatagtttggttgtcactgtagctccaacttataaaatcgtggtgtacatgaatatataaaggcctggagaaggccgagaataaaggatctaaacacttcccaaatatattcagtatgggacactctttgttggcacaactattttaccagttttgtaaagggcagtgtttggaccttaaatcagacatttaagatttctagttaatagagcaagctctgtctccataagccgttatcagtggtgatttctgcccgctaccccaggtgatatttggcaatatctagagacatttttacttgtcacaacttgagggagcttctggcatgtatgggtagtgccaaacatcttgcatgcacaggacgaccacccataggaaaggagtatctggctccaaatgtcaatagtgttgaggttgagaaccctgctctagatgatggagacaaaggctggttcaaatcttttaagaattgaaccattcttttaagaaccccattctaaggttgaggaagatggggaatcaggaaggagagagcaagataagcccccagttaactgaagccacagggcaagctggagcatggtcacaggaacaggacagaaggccagttcttacagctgagcaccaagccagagcagaaccagcagcaagactgacctgatcctaaacttctaacaatgctgatccttaaatcatcccctggggaagggaaacagaaactctattttgtgtttcttgtggaccagaaactgtgctggttttcatacagtgaaaattttatcttatttaatcctaaaatcctcataagagaaatttatattcctattacaggaaatagagtctatagtacaattgcctatttatttatgtagctccttcattagcttataaactccttgaggtgaaaaataggtctttcatctgttttcctagtgtggtaactgctgtacattaggtacttaataaatatgaatgaaaaatattaatgaagagtaaggaaagtcattcaagtagtaagtggtagattcgagcctggttcttgttaattaaacttttaattttgtaataattttggatttatagaaaagctgcaaaggtagtatagagagatcctgtatacctttcactcaattttcttccattaatagctgatataatactagtatatttgtcaaaacaaagacattaacattggtacatgaccatgaactaaactcaagactttcttcaaattttatcagtttttttctgttccagaattcaattcaggtttataccctgcattaagaatgcttacatttttctataacatagtccagggcctgaataagaagggatctgcaggtgtaggtcagggatggcagatatgggtactgatttgttatagaccagaaaagcaggccaagacttttgagtcctacttttatattggagggctccatcattcttctcttcctgaataatacccagcaagttgtacttaacttgctgaaatatttttcagtagtgattttcaaaaggaaaaataggaaaatagttgtgaataaaataattgcttcattcaggctgggcactgtggctcatgcctttaatcctagcactttgggaggctgaagtgggcaggtcacttgaggtcaggagttcgataccagcttggccaacatggtgaaaccctgcctctactaaaaatataaaaattagccaagcatggtggcatgcacctgtagtcccagctacttgggaggctgaggtggtaggatcacttgcaccctggagatggaggttgcagtgagctgagatcatgccactgcattccagtgtgggtaacagagtgaaactccatctcaaaaaaaattgcttaattctttatttaatgctcaagacattttaagtctttactaattgattaattttcagtcattggttaatgtgcacagcagtaaaaagaccttgtacagtttaaaactatgaatcaaatccatggaagcataagacattaaaaaaactgataattaaaataatcctgagagcttctggatagccgaacatgtggagcttcctagactaaggtggcgcacccggggagggaatgggagctgcatgcccttccctcatgccgtgccctacacatctctttatttatctcccttgtaatatcatttataagaaacctaggaaataacaataatactgacatgttgccttgacagagattctaaaatcacattaaatgctaaaaataagctatttatttatggacttatgcttgcatttggtgttctttgtgccaaagttctacgaagcaggtttgccagctctttcagctatgtgctattggtgagggatattgcccaagaaatagcttttggatgttttattgttctgtgaatatgtccacaccatctacgaatgcctcctcaatagcacccattgagaaatttagatacttcggaatcctgttgcctggccccaagtagacgtataggttcctttacttagcctgtctttctcaaaaggacttgcttcttcatggcagccgatttgcaagggttctagtttctcatttctgaaaaggtagtggagaaatgaggggtttaggctgtactgcctttgaaacttaaatactattaatactattattgaaacagtgaaacagaaacttcaaatgtattgcttcctttatttttaatgagataaataactttatagtttactttagtcagtaccttaaaaatgaaataaaaggagccaaagttgtgacctacctagcaaaggacacacaactaattattggctcatagctatagggcagttatctgaatcataatgcagagatgctacttttgtaccacaaagtctttctgtctttccaggatgcctgcatggggttaatagtgcggcttctcatccatatgcctaagtttaagtcctagtttgttagttcactcttctctgcctcaatttccttatctgtaaaatggggataataattgtacctacctcataggatttttttgaaaattaggagtatgaataaataaatgaataagaattagaacggtgtctgcaaataatgagtgttatgtgagagttaaagtatttaattcacctcattattattgcatattaattcatctataatcatgttattattaattttaccaaaagtatgtatgctgaatcattgtatttttaaatcaacttactgggtgtattttatagtgtgttttaacaatatctatttaaaacagtacaaataaaactacaaatgagagtaaataattcactattttctcctcacataaaagatatagaaaatcttataaaaatgaaacagtgaataaagtgtagtcaggataaaaatatagaaaacattttacagaatctttaaagtgattttaaaagcatgttattgctcctaccatgttttaatcagaagcatgtatggaatatcaggcttctggacatcaactgagcagaaggaaatttcgcactcatactcttcttcagaaatgcttaatattcatttgtgcagtgtcttcttgggaatggctgtggcctttcacgtggtgtcactgagacactgagagggagacttgactttgaggtgaagggccagaaacccagaatctattcttacccagttctttgacccggcccccgacaaatacacagaatcgttaaacttggccatgcccatccccaaagtttgcctctttcctatttctcctctcatctttccctgtcctgtcaccagactcttcagactgcacatgcaattcaggcattaatgtgatacttgtaatgattcctacatttttagttgagaatctatggtgtgaaatataatgttggtgttgagaataaacttacattttcattaaaaatgttcatatcttaatgccccaaaatgggccattcttcagccttttgtggggaagaggaaagtacctgatgacatgcatttgtttataggtgtccttcaacttcttaatgtggaaattcagaacttcgggtcaccattgtactcatctgttgaattcagtaatgtgtcagcaggatcctggatcatatcatctactctgcaccagagctgtggcgggggcattcatgcagctgccagtcatggagtacttttaaatgacaatattgtgtttggcacagctggccatggcatagatttagagggtcaggcctatactgtcactaataaccttgtggttctgatgacacagccagcgtggtccaccatttgggtggcgggaatcaaagtgaaccaggtaaaggacatcaacctccatggcaacgttgtggcaggatcagagagacttggctttcacatccgaggccacaagtgctcctcttgtgaactgctttggtctgacaatgtggcgcattcaagtcttcatggccttcatctctataaggaaagtggacttgacaactgtaccagaatctctggcttcttggctttcaagaactttgactatggtgccatgttacatgtagagaacagcgtggagatagagaacattactctggtagacaatactattggtcttttggcagtagtgtatgtattttctgctccacaaaattccgtcaaaaaagtgcagattgtgcttaggaattcagtcattgtggccaccagctcttcttttgactgcattcaggacaaagtgaagccgcactcagccaacttgacatcaacagatagagctccctccaatccaagaggaggtcgaattggtattctgtggcctgtattcacctcagaaccaaatcagtggcctcaggagccatggcacaaagtgaggaatgatcattcaatttcaggaatcatgaaacttcaaggtaggatgttttattttatctaggcagtgccatttcatacatccatgcataaaatttttaatggcattctgaaattttatcaacaaaaaggtacattgtggtctagtgcttgctgtccaacctgctgagtattgatagccacaatggtagtttataatttcttacaaaagtcactgctttatacatattgaagagctttctacaacaactattattttttaataaaatttaaaaaatttgaatataatgagatgggatcttgctatcttgaccaggctggtctcaaactcctggcctcaagcagtcctcccatctcagcctcccaaagtgttgggattacaggcataagccaccactcccggctaacacagcaattatttaacttgattacataagaactctcttggttaggtgttatttttcctattatacaagtgaggaaattgaaatgtagaagttgtgtctcatctgaagttgcttagtagatggttgagcaacgagggttaaaatcaaagttgtgacacgactggtgcagttcatcttctattagatctcttgtaccaccattgtagtctctcccctgttacttagtttatctggcagtgggtttgtctttctgtaaaatgaatggattttgattaagcctcaaatgaaaagccatattgctcttaaaggtttaacgtattgaaatactcttctctgttgcatgcaatgtccatgtattgaagaactactgatattttatatcaagatgtatgtaaactcctaaggctatcctggatagctttaactaacttagggtatacattattataacaatatttagttgtatattcgatatttgtggctggtggtttatatgatataatattatgatacatatttttaaaatttcagatgttaccttttctagttttgtgaagagttgctatagcgatgacctggatgtctgcattctaccaaatgcagagaacagtggaattatgcacccaataacagcagagaggaccaggatgctaaagataaaagataaaaacaagttctactttccttcattacaacccaggtataatttttagtatttataataagccatatttatgaagtacttggcaattcttcaaaccctaaacatgttttttgaaaggaataaaatcatcaaagaaatagaaatgaatcttagaatggtaaggtacattaacttaatgaccaattctttacccctcctatattcacgccttgtgatatatgatttttaaaatatctctcactaaagaggcaggggctatttccctcccccttgaatctggactcagccatgtgattttctttagctgatgaaagaggcagaagtaatgaagtgcaagttttattgatattgttttattgttttgtcttaattagagagacttctttgggatgttttcaaacttgctggtaataaattgactctaattcttcattcttcattggagtaaagtgtcagtggtcttcagaaggagaccttgggagccttttgtgcaggaactagtagatagaaggagattgtgtctgctgacaggaatctctgaactgaacgatgaggtctagcagatattggtatttcagaccaggtgtaaatactgttttctgacatatgatctaagagtttcattcaaatatgtgaaaattagataggatttttttatgccatgaaagagagtagaaagttagaaacaggaagaatgaattactttttctttcccacaacactggggcaaactcctttattggaagaaaaaaaaacaaagcaaaaaactaaagaagccaccctaattagaacattcatgtgtttggcttaacacgagtctctttttgatgcctatccctgaatcatgattaggtacctaaacatgagtaggtaggcaatttgtgttgttttgtcactttttaaaatttactatccaattttccttatgttcatgtcttatcccgggctgatatagctgttaagttacatgtcttagtctgtttgtgctgctataacaaagtaccacagactggataatttatgaagaacagaaatttatttattttatttttggagatggggtctcactgtgtcacccaggttgaagtgcagtggcacaatcatggctaactgcagccttgacctcctgagctcaagtgatcctcccgcctcagcctcccaaagttttgggattacaggctgaaccactgcacctggacataaatttatttcttatagttctggaggctggggagtccaagatcaaacactggcataataggcgtctggtgaaggtttctccctccttccaagatggtgccttgttcgtgcatcttccagaggggagaaacgctgtgttctcacataggagaagaaatggaagggcaagagagtactctcttcatcctcaagcccttttataagggtactatcttattcatgagaattgaatcctcatagctttatcacttcccaaaggccacacttcttaatactgtttcattaaggattaagtttcaacatgaaatttgaaaggaccatcattcaaatcatagtactatgtgatattaacagctgaatctttgtgctgataatactcaatacattgttggtatacaataaatatttaatattattactaatggtatttcaaagcattagattaggggaaataaaataagttctctgtaagtcaacattataattatctattaattgtttatatagcccacttgactctaaattctgaaagtgcagtgccatgtttggctttattaccatcatgttacccagcctgtcttttgtaggttttcaatagatatttgttgaatgagaatatctatttttctttgcatatagcataaatataattgatatttataataattctaaaatactgcaaacccctgaaattcctaaaaataattatattatgttcagttgttatgagaggaacactttattgtatcttgcttcttaaaaaatcagcaatctatataaagattacatattaggatatccaaaatatttggttagtaagaatgtctttcttcttgaccatataattgggaaataaattatttcataaagagttttattttatatctatgtaacacattgtcaataataaaaatctgttgaatttattttaaacaacattagcactaccaatgtatattttcttcttgctgcttatcatgaaatgaaagagttgctttttgactgtcttcacaggaaagatttaggaaaagtagtctgtcctgaattagactgtgcaagtccaagaaaatatctcttcaaggatctggatgggagagccctgggtctgcctccaccagtttctgtatttcctaaaacagaggcagaatggactgcatccttcttcaacgcaggtaagctatatctgaatgcaatgcctgtggtagaggcaagggtgcttgtgaaggagctggttttgctgtgctcactgagaatgaaatgtactggtgaagacctaaattctagagttggagtctgtgctaatctgctgccaattcacctgtattacaggaatgctgagtcattatgtgatctcacaactttactgctgtgccctctatgagattgcctgtgtccatgtcaaaagtgcagattctcaatgcccaacttagtgcacagctgggaggacagttctcgcccagcttgggcacttgggcctgaagcagccatcatgctcagtgtttcatactggtctgccatggaaccagctcctttttctttaagcttacctttcttttctgtcaggacttaaagcgctctctcaatggtagggtagatgtcatgtgttttgtctcccttttctccattctccaactctcccccaaacaaggctgtgctccaaacttcttcctcttcttgcttatgcaaacaaagcacccttttatgtcaatttttatggctggacccctggagagatcattgtctttttatttccactaacaagctgactctgaattctcatttgtgttcagctggaacctgctccggtcaaatgtaaagaagtttttctgttttctccctatctcattagttgattctttttagatttcttttctggtctcccttgtccttttaaatttttgaatgtgtgactttcacaggactatgtcctgagacctttttccttctttctctaattttgctccccaggaccaagactgaaataccatcaaatgctgatgacttccaatttatatcctcagcctagactcgaccctgaaatttggtctagtatagccaactgactttacttggaaagatagtagacatctcagactcaatatgcctcaaaaagattcttgatctcttccccaatctacaacctgcttcttgcctagctgtccctacctcagtaattggtgccaccattcattaggctatttaagtaaaaaacctgggagtcatcttttatttttctttttcctaacccaaattctcaaacttctcatttcctccactactaccaccctcaccattccctttactactagccaccattgtctctcactagatgagggaatagcctccttgctggtcttctttcttctacttttgtagtctctagtctattcttcacacatggccagagggatattttcagctttccacccattcagaatgaagtcccagctacaagcctgtaagtcttgtagcccctggttcctgcccactctctcacctcctctcttgtgacacgccttttacttacttatcctggtctcttatttttcgtttaacatggtatgtgtatcactacatcagggcgtttgtgctggctttttcctcttcctggaatattttattctcacttctttgggagctagttcccgctgttcaaataaggtaccctcagagaagccatccttgaccaccctatctaaaataatcatgagatcatttttctgtagctctactgtgcttgctttattgtttgttagagtcgtggtacttaacattatattataaatgtaattgcttatgttaatgtactgtttatcctttttagaacacaaacttcatgagggcaggattttttttttgttgttcactgatgtgtatttgggggttactcaataaattttggttgactgatcaaatgaatggattataagtaaccagccagaagagtttgctgttacacgtcatccaagagcatgcagaatgaactgaggccttcaggtcattggtttaagaatttatctgtaatatgaaagcctaaaatgcagacagttctatgtatctttttacttgttttcacctttctttcacctgaactactgctacagtacagcatttgacatttggagctgtttctacatatgattcttttaattaccataaaatttcatgcttgaatatttatactttttaacatttattttatgtttttccatatgttgaaggcttatctctggaatagagtgaaaagctgtaaggactacagtattggttttaaagtcagtgccaagcgcatggaaatgctgaataaatgttcgttttaatgtgttggttgcatttgttgaatagaaccagcaaatatattttttgcacagaagaatgaaattcagggacacatttatactgagaaaatatgtgggtagcactaaaaagaaagtagcaaaagaagaaaagataaggggttaccctcctatttacccctagatctactcaaatggtgttctatagtaagttttctattggttttaagaattattccaccattacaggtatttatgctatggggaaaacattctgatatgttaaaataagcacatgcctaattgtgggacttttctggacttgagcttttggtgaggatcccatttctttggaatccataagggatgtatgttccagagtatttgatgaaaattatattttatcctaacagaagggaataaagactgaagatagtgtcttagtttgggttgtcccagaagcagaccctgatacaaggcttagaatccaagtagtttaatggggggcgatcctataaaacaccagtaggaaaatgaggaagtatcctaggaaaagaaataaggccaataagggaagtgttatcaaactggttaccactgtggaagctggcgctcaagtctgatagggaactgcgggagaccatgggaacagcaccccaaattatcccagccaagccacagggaagctcatgtgttaatatttcaaatcctggctcccctgtcttggagcttacctttcttttctgtcaggactttgggggatgctttggggacattaactctccagccctttggctttctctgaacacaggctaactgtgctcttccttgaggccaccaaaaactctcagaaggaaaaaaaaaagagaaaaacattgataccaaaattatcaaaagaaaaaaagctttttcagaaggaagtcataggttttgtggtagcagcctttggtgtatgaaggtgagtgccaaaaatacatgggtgtggcatcaaaagcatcccttacaaatagaaactctaaaatgtcagtcagattctccatgtttaatcataagagtgttcattttaggtggttgcttaccagatggtgtaatatgctatttaggcacaaatatgttcttgctgctggttgcaatggtagaatatttgctttttctcagttctttaccatggctgtcaaacatgattcaatggtaaaactccatgagtaatatcatattacacacgatttactatcagtgtgtggacaagcatgtatgtgtgtgagtggctgaatgtctgtatggaggtatatatgactgattgcctaaacccctgatgttttagagctttataacattttaaatgaggttgctataggtaccaactgcaaggattcccacagtggaatctgctgtttactgcactaaaaatacaatctgtgtcctcttgcaatgaaagagacagcacatagtaaatggtgccttccgggtgctgacaggattgcagtatttttctttgacttccaaagtatgagtaaatcccttcttccttaatgcaaatttcttttcattattaaaccattttctcttagctactttgcagttactgtccacagtctgttggatgaaaaaagcacagatttaatcttaggataattaatgactattttgtattttttcagttcaagacaagaatctattatcatcttcagtaaatcagagaaagcaatgcagctaaggtgaagatggagaccactggaattttatatttattccaaatgtcattgagtttaacagacccttatatcctttccatatttttttaaacatatctctccaagtcatttggaatccattgcctttgaggtttatttttaatttggaaaataacagattttatttgcacatataagttcgtacaaaaactactcacccagacagatatccacaggtcccagcatattgtcatattaggagcaaaaaccatccatgtggatcagctctgaggaacactctgccagtgggttttgctatctgtgtaatgcaggatgtgtagccaggggagaagagagctgctaattttgatttatacttatctgtaagtttgcatgtgcagccaacttggaaaaatgtataacagtagagagcaagacagctcatgccaagcaggtgatcttctgagaaccatttacattttattctcgaaaggatttcttttgattatggaggcatctgatgatctgaacattcaaaatcatttagaagaacaaagcattgaaattaatgtcccattcaggtagaattaggcagataccaaagctttccattctggctccaaactcagtttccgtctgtcccagactacaaatggatggcataacctcacaccccggttcacacatgtggggcaccagcagtgtcaggaggcagcagaaagaaatcagagcttcagtttcaacagaatttaacaatttctcagccatgacaaaaaaaaaagtggaagggaggtaaaatgaaaactagcattgcatgagcaccttttttatgctacacgctgaaattggcattttcattcatttggcaagtgtattttgcctactttctgtctaccagagcgtctctaagcatggaaactatagcaatgagcaaaacaacatttctgctgccatcaaacttatgttccagtagggttaggtacataaacaaataaaaattccagaggtacataaacaaaattccaaataaaaaatattctgggatctgtggctcatgcctataatcctagcactttgggaggctgaggcaggcagatcacccaaagttgggagttggagaccagcatggccaatgtgatgaaaatccgtctctactaaaaatagaaaaattagccaggtatgatggcacatgcctgtgatcccagctactcaggaggctgagggatgaaaatcgcttgaacccgggaggcgggggttacagtgagccaagatgacgccactgcactccagcctggttgacagagtgagacctgtctctaaaacaattatatatattatatatataatacatgtacatacacatgcacacatatatatgtgtatgtgtatgtatataacatgagtatattttatatgtgtgtatgtatgtattttatatatatgtaaaaaaatatataaatatatataaaatacatattaaaatatataaaaaatatataaaatacgtatatataaaataaaaaatatatatatataaagtacatacacacacacacacacattccaggagagatgagaaggatggaaaaaatacaatagtgttttgggctagaaaggtagtttgagttgtctgtgtgtgtgtgtgtcttgtgtgcaggcgaattgctatttgaaatagttgcatttcaaatgagacctgaatggggagtgaggagtgcctgccctgagcagagggaggagacttccaggcagagggagcagccagggcagggactctgagatccaaaagggcctcagcatgtgtgagaggtgggtggaaaggagaccactgtgtgcagtttttgagagaagaagcagttgcagatagacaggagccagcctctttcttggccagagtaaaaggtttggattttatttcaatttatttatttagtgtacatttcagatgtacagcatgatgttttgatactcttacacatagtaaaatgactactatagtgaagcaaatgaacatatccatcatctcacatggttaaccacccctactttttgtgacaagagcacctataattcatagtattagcaaaaatcgtgactacaacacagtattattaacctagggtcctcacgttgtgaattacacctctggacttattcgccttacatatccttacatatctgcaactctgtgtcctttgaccaacatcccctcatttcctctcactcccaaacccctgtctctgttaaccacagttttatttcctatttctatatattttgggagattttaagaaaggtggcagtaggattttccttgctccctgaaaagattgtgctagctgtgttggagtgcgctagctgtctggaggcgggcagtgcagccaggaagctgtgcaggtggaaggggagcaggtggggcttggaggtagctgctccacgcgtgctggcccacaaactatcggctacctgtctacagtgaggtattcacagaaatttaccacttagaaacacagcaatttggcagagtaattttatgtctgttgagtctaataagtaaacgtggggcttatagtttgtatatctaatttgtctgattatttgtatttttttaaattattactcttcaatagactgaaaattttaaaacaaaacaaacccccctcattctcctgccaatatttttttatgatgtggtcaggacactagctactaaaactgacttatcattaggatcatctaggacattaaacattcattggcatgtagggagattttgaatcaatagatgtgtgtaaagtccagacctttgagttaaacacacacacacacacacacacactcacacacacacaaacaataagtgattctgctgtgttaggcttgagaatcatcactatagagttatatgttccttttgaagtaaataaacaagatattaagaagacaatatttttaatttagtgagtggatagtttcaaattttcatgaataatcaagaattagctctctgtgccaaataccaacagatataaacatacttgcttatgaacacactgaatatatttccacaagagaaaagaacattagctaaaaagattcaggaatatttacaatcttaattatttgaataaaaacaacatattaaacctctttttaaatggatcatttttcctagaagtgaggtgactgacctcaaaatgtcactttcataatatatcagtggataaaaatgggtttgatactaagtgtatgttttaaatgccacatagaatagttatattaaaaatataaactcacgataagcttttcccacactttccttggcattatttccagcaaagtactgtggtctgaccaagatttctgaccacatacaccttcagggcaggtgagtttcccattctttaccatgagacagtagggaacatttttcaaattgtgttacttcttggacacttctcaagaaagaaagttataaaccactgtggagaccttaaaagtgactggcctcaaatcaaaaataaaagattaggttgataaaaaaaagaaaataaagctggcatttgactgtcagcccactgagtgatgaagtggtttctaactgaataatggggaaagctcaggtattgtggtgacgtctgctcagctacttaacagagagtggcttgcagtttctcaactttttgttgctagaccttgaaatgtgtcttttctttaaggtttctaggcttctcttttttcccatttatcctgagaatgacagcaagatggtattataaaatgggagattggagagggagggagaaaatgagaggacagaatggagagaggaaacggttagaaaatttgtctgccaatatctgtgcttgcagaggtctttttcttctagctagaggggaaaataccattctcttttcccaagcaattacaggccccaaagattgaagcttggtatatagctctttaatttcagcagatatttatggttaaacattagacttttaggattccagatgtcatggtattaaaatataaaggcacagtggagtctcagaaaatattagactctttgggattcgcagctgcaagggattttaatcccaagcagggggggatacggcttctagtggtacatcgttcagacccaaagagtacctttccttcaccttattttgtcactccctcatgacttgcctggtctccaggcagtgaatgccataacaatatttgattacatttcaaagtagtccatgctgtgagttggaatgattttcatgtgtgatctataaaagatgatatgaacaggcatgtgatctatggggacaatttccttttcctttcctcaatctagacatgttattattgtgattgtcttgctcctcaaatcttccattaacaataacagcatctaacacttgctgagtgtccaccatatttctggctctgtgctgtgacctttcaatgagttacctcatttaatgccatcaacgggttctactctaagagatagtcctgttgcctccattttataggtgtgggaactgatgtagacattaggtaaattgtccaagtcctaaagctaattaacaaggttcagattgaactgtgtttttatttttattttttatttttagaaacaaggtctcactctgtcgcccaggccagagtgcagtggtacaatcatagctcactacaaccttcaactcctgggctcaagtgatcctcccacctcagccttccaagtagctgtgactacaggcacatgtcaccacacctggctagttttttttaaaaaaaatttttcgtagagatgaggtctcactatattggccaggctggtcttgaactcctggtctcaagcgatcctcttaccttggcctcccaaagtgctgcaattatgggcatgagtcaccatgcccagccccgaactgtgtttttaagactatgctatactacccagtaccctctatccaagttttctccttctttctttatattcttcagtgttaactgttttagatctgtcagctttcatcgcatacaaagctctgtccacacagaacaaacaaaactgagattgtacaattattctagcaattatccaaacaaactagcaataataataattgccattatctagtgcattccatgtgccaggcattatgctaaatagtttataaatactctcatttatccttacaacaaccttaacatgaagggatcgttataccccttcacatttgggaaaatagaggtttggagaagttaactaatttttcacagtcccacagttagaatgtgcagaaccaagatttaaatctatatttgtctgactccaaagccagagttcataaccacttctggataattatcattgtgtggtctgaatcatctggtaggactctatacagagatatatttaactggatcattcacatatttttactttacttggtagcaaatagatttttagagtttaacaagtaactgtcgactactttaacatttttgaagggcgatgctataacaaccacaaaaaaactcatttagttcctcttcttcatacataatatatatacagctattcctaaacatccatgtggcattggttctaggacccctacagataccaaaatccacagatgctcaagtcttatattaaaaaggtgtagtgtttgcatctaatctacatacattctcctgtacactttaaatcgtgtgtcgattacttataatacctaataagatggctaacacatcacttcgtttgtgtggattcaacatagtactcgtcaggtggcaaaatcaaaatcaagtgaaacttctgtttggaactttgtagagtttttttttttcctccacatatttttgatctgcagtttttgatctgatcagcggatttttgatcaaatccactgatgcagaactcaggaatatggaggacctttgtgactctccttcacccgttgctcagctccattacagcccctctcgtgggttaccgccatcattttacaagtctgctttcttaccagactgtgagtgacttcaaggtaaatgtctttgaatttctagtacaatttatggaacataatataggctttgttaatgtttgctgaatgagggaacaaatgtgaataagaaagtcaagaatttaagtttagtttgccagtcaactcttccacaaagtaaattttatagatttaattaatgcataatttgttttagcattttcaaagaatattcccccattttctaatttcaggagattgtaaaaaatgtggtacatggccaaataaattttgaaaactctgactattcctattttggagaccaccatgtgtattaaaatactgaagattctgataagttctgcaattaaatttttaaaaacactgtttaattttgtgttacccggtgtttcccaagctttttgactagagaatacctgttcatactacacattagggtcccttggaactagtgtacttcagaacacattctgggaaatattgcctcatgttaatctattagtctacaggaatacatgctacttggaaagaaatgacaagattgtagtgcctttgatttggatggtcccttgaagatcaatcagcttcacttcacatgcatacgtgccctttacctttcattttcccaggaagtgggagttcacacccttttaaggctgcctatattatattttgaataacttgttattgttaggctcttccttctatgacttctacccagtgacctagtttgccttttggcatgacagagtataagtctttccaggtttcatataagtctttctgtattacagcattttacatattcaaagacagtaagacaatgattttataataagccaaataagactttttcaagcataggaattctaaattccttctatcagccaatatatgacatttttttagttcttcactttttagactggcttatgtttttattgtggtaaaatacatataatataaaatttaccatcttaaccatttttttttttttttgagagggagtctccctctgtcctcaggctggagtgcagtggtgtgatctcagctcactgcaagctccgcctcctgggttcacaccattctcctgcctcagcctcagtagctgggactacaggctcccaccaccacgcccggctaattttttgtatttttagtagagacagggtttcactgtgttagccaggatgatctaggtctcctgaccttgtgatccgcccatctcgttctcccaaagtactgggattacaggtgtgagtcactgtgcctggcccatcttaaccatttttaagtgtacagttcagtggtattaaatacattcatagtattgtgcaaccatcactaccatacttctccataagtcttttcaactcttaaaactgaaactctaatgtcattaaacagtaacttcccattcttccctaccccgtgttcctgaaaaccaacattccactctctgggtctatgattttgactacccttaagtacctcatataagtagaatcatacaataccttttggtactggcttatttcttttagcataatgttctcagggttcatccatgttgtagcatattatggaatttcattccattgcatgaacttaccacattttgcttatccattcatccacccatggacacctggaatgcttccatgttttagctattgtaaataatgctactatgaatatggtatacaaatatctcttagagactctactttcaattctattgggtatagatccagaagtgaaatagcaaggtcatgtgatagttctattttcaaccttttgtggaaccataatgttgtttcccacaataactgtaccattttacattcccaccaacagtacacaatggtttctccacatccttgttgacacttgaaattttctactttgatagtaaccattttaatgggtgtgaggtgatatgtcgttgtaattttgatttgcatttcccaagtgattagtagtgttgaacatcttttcatggagtcattgttaatttgaatatcttttttggagaaatgtctattcaagtcccatattaatttttgaattgggctgtttgggtttttttgttattgttgaatcttaggagttgtggtttatgttgtggatattaatcctttactagacatatgatttgcaaatatttccccccatacttcaggtttccttttcactctgttgatagagttttttgatccacaaatttttgatatttttatgaaggactggcatatttttgatgatcttcagttttcagtgatttttttctaaatctaggaataagaactgaatattaaccatccagaacagtattgttcaaaagaaatataatgcaccagtgtgacttagtatcttagcatccaggctaaaagcagtaaaaagaaacagctcaatatatttaaaaatcatcattttaatatgtaatcagtgtagttgagatattttgcattatgtttcttatactatgtgtttaaaatctgttgtgctttttactgttatgccatgtcaatttataaagtgtttttatcaaaagtatttgatctttgcctatattttataaactttgcaactgaaaaagtagaatcacatataaacattgtttaaaatatacctaaacattttccaataattgttatcagttttacattttaaattataattaattaaaattatacataatttgaagcttagctccttgggtgcactagtcacatttcaaagactaaatagctacatgtagctgcattcatcatatggatatttttcttcctttgttctgagggatacacattaaagagaattgattttttaagccatgtagtagactctatttatccctggtaaattacccttttataagtcagtggtcatcagatgtagcctgggttcctaggattagaaatgaatcacagaattagaaaccaatctagagagcacctaattgatcctgggcatataattcagtcaattaaaaaacaaagcttgtctagacttggattacctgccatttgcaggaggtattatttaaatactcaagcctccaaccaaagcatcaagattttctgagactgagaattttactactcaagttaacaatcctttatgagaaatctattcacatttctctgttttattgtatgtttgaaaagcagtaatatcagtgttccacaagaggagctatttttgaatacctatctgtaaatgaaattacttgatttttttgccataataataaactggctctgtattttctatttctttttattttagtttatttcttttttctctttttttcccatattatttcaaggacttcattgactagtaagctgtgttcctagtcttcaagttttaataatggagtaaccctgcgttgctgctttaatcctttcagtacaatagtattgaaaaatttaacaaaaagtattagccaggtgtggtggtgcacacctataataccagctacttgggaggctgaggtaagaggatcacctgagcctgagaggtcaaggctgaagtgagccatgattatgccactgcactccagcgtgggtgacagagtgagaccctcttccctcccttcaacctctcaaaaatttagaaggtagaatctcaaacctgagcttattttatgcctaagatgaatggatgaatgtttgtctattttcagtttcattatttttatattttcatgtgtatgcatatatgcacattttaatggaagggaatacttgagcagtccctccaataaataaaatgcttgtgccttgccaatagataccaaaccagctcataaataagtactaagcaaattctcatctcaatattatgggtctgaaaaattcgcttgtctggtttacagttttttctttatgtatttacattttcatgagatgtaaaaagtaatcttagtttctgacaattggaagcattcattaaaaatattctagaaataaatatgttgatggaataaacttctaaaagtcggaaatagattcagatgcatttgacaatttagtttataacaaaaatagcattttaaattatgggaaaatagaaatcattcaaatagcaacgttgagccatttgactcatcatgtagggagaaaaaacaattcagaaatttttatctttttctttacaaaaataaattttaaatggattaaagatggaaaaccccatggaattactagaaaatattgatgacgttatttagagttacagggatacttctttgcatgaatcaaaatctagaaaatacgtgggtagatttaaaaatttgaatataaaagaattaaaacttcttaaagaatattaaaagcaaaactaaaaaactagaaataaatttgcaactcatctagcaaagggctaatttcatcaatgtaaaaacaacttactaatatttaagaacaaaaaggaacaaaccaactgaaaaaatttgcaaagaattccaagaaacattttacagagaaatgaaacaaatatcaataaacatacaaaaagccaaagttttctcacaatcaaagcacaggttaagagttcttgcactgagtccagctgcttggattgtgtccactaaccagatgtgcaattgtaagcaagttgctcatctcctttatgcctcagtttttaaatttaggacttggagatattaatattatgtactcaaatgattattataaggattaaaaagataaacctaataaagatttccaccacttctaaggcaataatgaccactgctactataattattattattttcccaatcatatttgcaataattaaaaagtgtgataatttgcagtgttggggaaaatgtggagaaagagttctcaaacttcgttctcaaatatcacttttcttagctttttgtcatctggctaccacctaaagctctgtacttctgacttagcaacttcacttttaagacattatcctagagatttttgttgaatgaataaataaaacagtaaaacagaaaatgaaaaagaaaatatatcatgcctcttacccctctgctatcttgatcttcagcactactactcagagggaaaaactagaaggttgccattaaaaaaatgtgtatgtataatttagtttttatagtaagaataatgatagtataactcatttatatggaaaactagaatcttgaaacatgagttggttattatgtaaagtgtgtcaaggaaaagaacaccaaagaaaagaaattttcctagacctagaagccaatctttctactacagaattaaggacttccagtatgactgaatttcaatttgattagcttcctcacaggagaaatattaataaaaactgaatgtaagttcttgaaagtcattgccatgaaggaagggagttgaagccattttttaatatggctatgaataataatctcttcccttttgggtgatattggtaggatgcaacctttcttgggcactgcccatgtggaaaccagcctatccatatctgtaggctatatactgtctttctgtttgaacacgttacagacaaaggaaatcttagagctttataattttgtagacaaaatgcatataaaaaacttggccccaggcctgtcataggataagcactaaataacttgactattccattccattgccaccactgccaccacttatcatgatcctggttggaatggtgatgaacatttgagcatgacatcctggtttttgtacaagttttctattgctgctataacaaattattaacaatgtagtggcttcaaacaacacctaagtattatctcacagttttgtaggtcagaagtctggtgaacttggctattttctctgcttcagatctctgatggccaaaattcaggtaatggcaggattgtgtttctttctggagtttctggagatgatttcaccttcagtctcactcaggttcttggccagattcagttccatgtagttgtaggactgtggtcgtgtaaccggccaaagagtccggctgctcactgcttatgaaaagaagtcaaaataataagttgtgataaaaggaagcaaaattggtttattatccatgctagcaggggaagagtagaaagcaattccactcttcagttcccctattcaattccacagaggtttttaaaggaaagatttggaatgcagaagaagtgtgggggctgagaggtataaggtagcgtgacttgctccagtggcccctcttgaacagttgtcctatttggcaaaggggatgctgccatcgtagaccctgccaggttataaattactttcagtcaattttgtagtcactcatcatctgggagtgggttccatctttaagcaatcttttgttagagagagaattccagaggtgccttgtcactatcaggatctgactcctaaagtatataaggaaatatatgaccagataagaaagcatggtgcgtgcttgacaagcatttaggtaaataaatgtgcataaggcatgggagtattgtatggagaaggaaaaggaattgagattcacagcacatactgaggctgtattttaatatgagaggttacatagatgtgttataggttgttagacaggcatagagtagggcagaagagggctctcccctacccactaggaatgttgagtgatggtttggcaattatcacattgcctccctaaaagtgacagattggcagatggtgccaggaagaggccatttcctgatgggccacacctgttgcactgaagtgttaattgaatggagacgccaggaagaagcaacttcctgggcatatgcactaagagacaaaaatggcagagtttgcctttccaggggcacaccagcagcaaagggaagaaagcctcagatgggcatgcatacagtttccttaacacactgtgcatgctcacctcccaagggtaaggagggcactgcatatgtgggcagaccaccctaagggaagaatcatgagaaggggtttaaagacgccagaagggggccaccctgtaaagtcctagtatcacagttaacagtgaaacaccacacttgttcttcaagtcacccacttggatctctatcaagcgtactttcctttctctcctgttccaaagccttttaaaatatacttcctcacctgctctgaaacttgtctcggtctctttttctgccttatatccctctgtcaagttctttcatctgaggaggcagaaattgaggttgctgcggacccacacagatttactgctggtaactcggataccttccatcagtaacatatgcagtttgtctcaaaattttatcccgagactggaagagaaaagaggaaaaggaaaataagaaaaaaaagtttaaaatgcagtttgaggctcagctgctaagctgctcagttatggttgctgtgtccttgttcactgtaggccaggcttcatgctcaacttctagggctgcctgcattccctgacttgcggctgtcttcatcttcaaaatcagcaatagctaattgtgtgcctctcatgctttgaatctctcccgccttctcctttactacaactctctaattctagccagagaaagttctctgcttctaaggtttatagtccaggatagtcttcctactttaagatctatacacttaataatatcttcaaagtcccttgccatattcacataatcaggattagggcataagcatcctagggaggctattattcagcacaccatagttatttgtaagaccttagtcttagttgaaataaaaaaagtaagacattggaatactgatgccatctctgcaagattttttctctttcaagaaagaaattagaccttacttaccacattttagaggtactgtggaagtgtggagaattccatatccactctgtaggataaacatcagtttttgattgaaaaattatgaggaaatgttgacagttcatatggggctggcccaggaagctggagggggatgaagcggtaatgggaacttagagggaacagaggtcagttcatgtggggtataccaagagatgtaaaaggatggataggatggcagaaaagaggtgattaagaccagttcctgcggggccagtatagcctggtttgtctttgacatttttgtcccaagttgaagcaagaaaattttattttaatatgcactttattttaccatatgtattttaagtatgattgtttacaataaactctctttgatgtgtttatttactacacaactgcttcaaaatacggccaggattggcctcatccaccaattgcccctgagttaatggaaccggaatttaagcattagaaactcctgtatgtccagtgcctgataatgtttggtgacatgaacgtgaacttctataataaagaaaagcagctcatttaccctggatctctcagacacatctatgacctacccaaatagctgagtttgagcttgcaaaagcttagatgagggagcactgcattttgcagcaattaattttgcagaggaagcagtgtgtttaaagatgcctgcagcactcactaaaatgggggttgtttttcaaggccaccagagctgcatttggctaaggctggctcatcaacaaaacaacaatgctaaaatatggcctcctgggttttgcaaaagaagggactagaagggcaatgaattatgctcaccttctagaactgggtgaagactgtaattgtttagccccctagcacaaccctgcaagggttaaaatgacagagatattagtttgtgatggctaaaattgttggtttgaagctctcggcaatacacagactgttatttaccagacttggtcgatttacttcttaatgcaataatgacctgtgaaatgaaacgtgagctagacaattgttcctcgttgtttccagtaaaacatcctttcataccccattaaaccaccattaattccatatgaaagacagtcatgcacaagcacccgatggtctctttctttcttggactttcttgctcccatacttctgtttcctttccttcttctttgcatttcctcttctctttctctccatttttccaaataaaatatgaacataataggttgcatggtgagaaatccctttgaaggacaggctgaaacacatctcttccaaaacaggggcaaggtttcaatttctgagcatccacatgactctctgtttgccttggacatgaaaataccaacagcaacagaaaagtttttcaaaacaaggagcaattgttcagtcctgtttaaaaaagatccagaggccttattccagatacgtaggttttacatggtcccacactggggatgccaatcatgtcacacagctaggcaccttcaccagcctggggcgagggtccttcccactgcagggacacagagggatcacaggaacccccctctgttttccagcagcctgactcattttgaacagcttctccttatttctggacctactttaacttttttattactaaaagctccaaccaagaagatctgagccacatggcataaaggtgcatttgtagtagttcctctctttgacccttttcttcctataacctcacagctaggggttgtcctaacttccttcactgcatgattaaaattttttgctatctagttcaccccttgctgttagcatggtcactgcatcactttaatttctgtctctgtgattgtattgccttctcgtttactgtagtcaaatatccctaggactccttcttataaggacacttgtgattacatttaccaactagataatccatgatacactcctcactcaagatccttaacttaattatgtctgcaaagtccccttttctatataagataacattcatagatactgatgtttaggacatggccatcttagggtcattattcagactaacatacacagtgattccaagatttcaagatatagatagattagatagatggatagatagatagatagtaatagtagagtgcagagattttttcttcctcctctgaaggctccagtctactgaggtgagctgacaataaatagatcaacaggacaaacggcatgcaaatttattaatgtgtgtaagagtgggagccatagagaatatcagattcaaagaagggccagatgattatggcttaaataccttctttataggaaagagtggtatgaggggctataggcagtttagaggagtagtaaatgatttctagggggagtacgtggtctcaaagactagataattgtttgcaaatcactccctttgaacactgaatgggacctaaggacaaacaatagtctttggacaagttataagaaggtgaggggagaaagtacactgtgaacataggttgtcttattatgcagatacagtctctcaggtaatcttttgcagctgccctcagaagaataggtgaaaaggttttgtgggcatatgacaatttttagtctcttctctggtggttaatttttcctgattagttgataagattcttagaaaggggatcttaagacaattgcatttcttttggaagaaggtttcttcactcagataccagagcaaatacctttctacacttgttggggaggtggtagaaataagagaagcttagaaagtccctggttctgaggcagtttctaaggcttttcaatttattttaattcaaaagtgctcagtatgccaaagcatcataccatactttggggtaccattctatgtacccaaactctctctctgtctttctctctttctggaattacatctggaaagcccagacctggtgatttaagatgttttctttcgcctttctccttttgagagagatggagaaagaggaaagaaaatatcttaaatcactcttggtaacccacacataactagtccaaaataacatttcaccatcaatttttattttaatcttgttttcacttcctgttttggagttagttgtgttatcacactttgaaattttcaataattcattttcccagctttcttaaaattactttacttaccatgaattgttcttcaatagtcaatagtcttatggtatatactctgacattgatctgtgtgacagtacccaggtaattagaaaggccagattccctacattcccaactccaaacaggatcacgcatgttggggaatgaatagtgcaggaggttgagcactaacaaggttttctctgtttgtgttaaggagaaagctatttagactgaccatatgtgtgcacttggaatctgttgaaaatgggactcatcactacagtctttcctagctgtttcctgtattttccatgttggagctgacatcacagaggtcccaagagcaaaaggacacctttaagatcatatagactatcacatcagattctgacacttggtcttagagaaaaaactgagatgtgattctgagcagacttttattctctttttcaagacaatatcttttctccctgttttaggatgcctttcaataaaaaattagctagaaaagaaatgagtaattagtgaagtaagtacatgattaatgactcatttaaaacatgcctaatttgaaaacaaaaatgaaaacaaatgagaatgaccctttattgttcagagcaggcctatttctgtggtggttccctgttgcaggagactttgcagaggtcctgtgtttttttcatgggacgtcttctccaccctgagaggaagtcagtctttctcttcacataaccttggaacttacagctgattccattcattcatgttacattttacttagaatggttaattacattagcatgtggctttccccaattagattatatcctcctggagggcaggaaagatttattatgttaattttagtttaatttaaccaatatatattgattatatattacaatgtggtaatagttactactattccaatagctcccatttactgggtgcctcttgcatgcctgcattgtgttatatgctttacggatcaggtctttacaataacttggaaaataagcctctggttaatcaattctaaatatgatgaaaccaatgctcacagagtttagggcctttgcttttttatatcaagtgataaagccaggctttgcattcaagtccatctgaattcagggcccatgctttttcttaatgtgcaaactttcgtttatataagctttctggggagtttagacataagtgagacgcaaccttgaacctcaaagaaataacaattcagtaagaaggaaaatccaagtaaccaactgtaatataaagcaatgtaagataagcacctagaaatgtataatctgtactctgagagctccaagttagtgggattttggcagaaggagaaaaggaccctccacactgagggcgggcatgagtaaagagctcggatattacaaggtgtggggtattttcatttggatgcaatgtggaaagcatgccgagaagaaaagaagggtggagacatatttttggagagccttcaatgtctgactaaagtacttctgtttacttcagtaaccactgagcaggctttgaagatttcagaatagaggaggagcctgcaggaagctgaactttgaaagattaatgaggcagcaggaagcagggtgaagaatgggttggagcatggaccaaatggaaagacttgttaagacactgtttcaattgttcaaattgagaagaaattgattgaggactgggaggagattgatggcagccagaatggagaggatggtacagatcaaagaaatacaaaagagaggaaatagagtttgcttactcctgactttggggactgtggagagggtgtcaacagtgacaccattgtccgtagtcaggatatctttgggaatggaagttccagtagcagatatgggggagtaggaaagaagaggatggttgcttaagctttgcctttagtgagtttggggtacccactatatgagagaggagcaattcagatattaaattggtggtgttgaaatctttggaattagagctttggagataaattgcagctagatataaattatctggaataaagtgataggtgaaataatatggtagagaagccttattttatttctctcttctttaccaattatattgagatattattattattggcatattaatatattattattggtatattaataatataataatataggtatattatcaataatatactaatactaatataccaataatagtgggttattgttaataatattggtaaagaaagaacataaatgtaagtttattaccaagaatattggtgtggtaaagataacccatttatgctggaggttgcaattttttgaattgcaaaatcagaccttggccatgaccttaagcagtaggatataaataactcccatgtgcccagtgttccattattggaacagtgtgccattcttgtgcactgatggaggaaatagttacagatacagtgtgatttgaggaattggttcccccagagccttattgaccctcaaatacttcccttacccatgttatcatttcctttctatcctaaaattgctacctttgctgccagatcttttccttcataaagtcaatgtgacatttactcatttattaactcatttcttcaacagatacttattgggcatttactgtatgccaagtattgtaataaatgctgtatgtacaaaatgacataatctctgccctcatttcttattagggagaatcaacaaaaagagataaattgtatatatatacacacacacacacacacacacacacacacacacatatacatacacacacaaatgtataattataaataggtaaataggtatatatgaataatatcctaaatatgataaatgctatataatgaaaaaaaaataggagtgctataagtgcatcaaaatttagaatagtggtggtggggacaatgtgagttgtcaaggcaggtggctcttggaagtgcgtttaaactgaaaccaaaattgagtaagagttggccagaaaaagcatggagggaaacgctttccacttccactcacagctgagtgagcagtctgtgtggaaaccccaagtaagaaagagcctgggcactggaggaaagcaggctgtagggactgaacaagggtgccgtgcaaatgagcagcctgagatgaggctggatatgtggatgagagttggttcctgaggagccctgtgggacatttgaagaaaatgagattttccttttttctttgcagaggagactgatataacttacttctcatttttaaaactctggaaggtttgcaagagtgggtaagagagagctgaattagcagttctatctcagtgatccatggtggtgatgttgattactctggtagcagtgaagattttgttaattttctgaaattttgaaaatatttcacacaagatagaaaagcataatggataatagaattgatttaggatattttttgccattttgcaatgtgccccctttaccctgcctccatgcacacacatctgaaagcttttttagtggttagactgccaactatgtgtaattcattggtacctattaaagttaaagcattcttaaaaatatgcatagtaaaatctcttttaagactttctttttcattcacaaaagatttatggagacatggcatatatgtcaggaaatgtattaggtgctggggctaaaaaaatgtgaataaagaatgatcctgtttttgaagagctgccagaccttgctttgtttataaattttgccaacagcataataaagtttttgctattagaaagcagtgccatttattgtacaatatataatataatttgtcaaattatagattggaaaattagtcattgtataaagagataacatatttgtaagataatttacaacttataaaaacagtaacacatttggggtctcataaaacctctccaagtcagtgtttctcaatgtggggagaggctgtcaatgattaattttgctgccaggggaagtttggcagtatttgatgacatttttgtttgtcccaactggaggggtgctactggcatgtagtgggtagagaccaggaaggctgtaaaacatcctacaatgcacagtatagcacctttcaaccgataatcatccagtacaaaatgtcaataggcaagggtgagaaaccctgtactaagtgatttcctttttgaccataagaaggattgcctacctgaggtgagaggattgctggagcccaggaggtcaaggctgcagtgagccgtgattgtgccactgcactctagcctgagcaacagagtgagaccctgtctcaagaaaaaaaaaattgtcttaaacatgatctaactcttaatttggcacactctttattatactacactgcttgttttagaagctttaatagttgatattcaaactaaatatatttatatatgcacttaaaattggctgtttcttgtatattttcatgaagctgtcatgttaatatattagtatccagacatcctagccagctaggatgttgttcccaagcctgtgtggactatattctgaattaaataaagccatgaaatatcaaaacagtttaagtacaaaaatatataacccctgtgccatattataggtacttaaatgataatttcttacaacataaatgtgaaataaactctgaacgcatgatgattgctctggtatttccttttgtcttgatgcagtatacttgcacatatgatcacatcaaattgcattatcaaatttaaatgtcatttccatgcttttttatttgattatatctccatttatagttattccattttatgtgaaagaaactggaaatatcataaatcactttcattgagaccatctctatttatctatagatcagataacaaatagtacaagttatttaatgaatgtgacatagtatagtggtataatctctctgtgcccaacttcagatctcatcagtaatatcctgattgcttaaacttgaagtagatacaatgaaaaggaattctaaatatttctatgtaccctttagaaattatacctcctacgcaatagtgacaactcacatttataggctgtgacagtattttgtgatttagttgaaacgtaagacacattttccacattttcttttcccaggagaaataatcatgatagaataagtgtgcttaaggtttctaggacacaggagaacgccacccctcattgggataatgtggcaaattggacacagtgaaagagcagtcagagagagaaagtaagactggcttgtaggcctagtaaaccgtggtccacagggcatgatttgaagggataagggaagtgctttttcccctgcaatgtctaatcagctcacctgccctcaggccttaagttccaacagaaaagattgatccattacgtatattaaaaaattgttttgtcttgagcagaccattatgaaaatgtcagtgatctgagatgaagcaaaagttgttaaccattagaataaaaccatttagcaaggcttccttagccaaaggtgtctatgctggaatactgtgttgagagaaaggccttttggaaatgagactcaagtggaagatacttgtgatgagggtcaaggcaaaacaaggtcttcttggcttggcctttgcctacgtcactggctttattttttaagagatccatctttttgaactcaggctaccttcttctctaacactatttcataccttcatgcctgtgtcccttccactctcttcccagtgtctccttcctttccctgcctattgacggattgcttactcaaaatacagtcatatgttgcttaacaatggtgatatgttctgaggagtgtgtcattagattatttaatcattgtgttagcatcatacagtgtacttaggcaaacctagatggtgcagcctgctccaaacctgggctatatggcatagctattgctcctgggttacaaacctgcaccacagcatattactgtactgaatactgtaggcaactataacacaatgatatttgtttatctaaacatagaacacagtaaatatagtattataaaattacagtattttaatcttttgggaccatcatcatatatgcagtccattttttttttttttgagacagagttttgctctcgacccccagactggaatgcagtggcatgatctcagctcactgcaatctctgcctcctgggttcaagaaatccttctccctcagcctcctgagtagctgggattacaggcacacaccaccatgcccagctaatttttgtttttttagtaaagacagggttttgccatgttggccaggctgttctcgaactcttgacctcaagtgatccgcctgccttggcctcccaaaatgttgggattacaggcgtgagccattggagtccattgttgactggaatgtcgtaatgtagttagtgactgcattaatcaggacaaggaagagagtcacaactctaagaaccttaagcaacacataagtatttggcttgtgcctctgggaaggatagtgcaacacctaacacagttgaagaaggagctggaagaaccatggccttggactaccaggattagtgtcaagggttcaatgctatttgccctctctctttttcttttctgcttgcctctgctccttatgactcttggccttatttccttctgctgtcaaagggcttatcctacatgtggttggaggggggtgatggtactgcctcagtaaacccagtttagtcatctcaggtgacaaagaatttttttctcctgatgtctatatatcaggcccagggaaatactgataaattctctttggctgttacacccacttcaggaccaatccctgagtccaatggaataagggaatatgactggctggaactcagttatacatatactcttgtggccagaggtcaggatccataaccagaagaaaggggagcaaagacatgtggggcagccaagcagtggctacacaacacgcaggactctaatcagcacttaaggcccactaagggagggactctatgaagccttttgtgaccctgaagtgagaatgggcaccccttcttggtgcctctgcctattaatgaacctaaaccattgtattacatttgtgtatttacaattttgaaagctttttaaagttgataatgcttttgtaatattttcagataattgatttatgtccccttagctcctccacctagatcaagagtgtgctaatgactcatatgaaggctggggttaagctaaatgaatattattttaatttcacatctctcttttattagtacatctaggcaaagccagccttattcacagaacattctagcttttggtcttctcttggccttattatacaaaaatacttcaaacactacaagtacaattttctttcaacaaatgagaccaaaagaactgcagaaataatctgttttagcaaatgtgcctttagtaactttttaaatttttttaaaattgattttgaagaattccactttttaatagtataatgaacacccacatagccagtatccatctctagaagtaaaactttcccaacttctgaagacagtttggacttctggactctgggcttccggactccatttgaatttccttccctgtcctttctcagatataactgtcttgaatttgctgtttctcattcctatgcatttcttcttatttttcttctttgttaagcctggttacaaaaacatgaacaaacagctcctctgtgtagatgagtatcagtgtcggtgacattcctcaccctaatctgtgtttaaatgtctctttctagtaggtgctacatttcttcccatgtcctcccaagtggtgggcactgactctgttaatgttgttgagtaaatgacatgaagatacaaaaagacaaagcagaaatgtgctcaaaaagaccaaaacccatttcccaattttgttcagggacatggaaaggctctagtgtgtgtttcatggtcttcatcagaccaggttgttctcaatactttgctaataaaatagcctttaattttaattctaggcatactaggtatctggaagaatatacatgagtgataaatcaaaattgcggtggcctttgacagtggttcaattttgaattcctgctttctctgcatgttagaaggaatttatattttgaatttttcctgcttttcaggaagaagcataatgaaggaggggagttgggaatacctgactttcccagttactggctctgtaaacttgggcaagttcatttatgctccctgagtccatttcctcattggaaaaatgggcatgataataactgttctgcctagttttggaagttgctttcagaaaaaaaagagagacaattcctaaactaggaaagaccacaagtataaaggagactagctttggtagaggctcttctgtgttccgtcatggggttaggaaggatggagatggttactctgccggagtggactttttttagacttaaggctcaatcttaataattctaattaattatttccaatattttattggaatttgtgaaaattccaataaaatattggaaataattgtgaaaatggtcttgtattcatgtgttcagacatattcctagccagaactcagatgctaaaactttacttactatgtaacagattggtaaatgtgatttttttcctctggtattgaaacttcaacagagggcccaagatctgagaagatctgggaacaaaaaaatagataacaaaacattcaccttctgaagtgaggttccagagttctggctctgcctgtgtatctttttacagtgatggaacgttctatattggttctatccaatatggtagcctgctagccacaggtaggtattgagcatgtgaaataggactaatgagatcgaggaactgaatcatttattttatttttattaaaatttaaatttacatagccatatacggtaagtggctactgtgttggacagtgtaaactaagaccacttataatgatcttgcaaaggaagtggttaaaacttagtgtggcttctgctcatctggcccgtcatgcacttccatggtatgtaagaaaggtgagtgttcattggaaggtagaagaggactgttatgagaatcatctgtagacaattttttttttttgaaatggagtctcactctgtcacccaggctagagtgcaatggcacgatctcagctcactgcaaccttcgcctcctgggttcaagcaactctcctgcctcagcctcccgagtaggtggaactactggcgtgtgccaccacacctggctaatttttgtatttttcatagagatggggtttcactatattggccaggctggtctcgaactcctgatctcgtgattcgcccacctcggcctcccaaagtgctgggattacaggcctgagccactgttcctggccaatttttttttctcaatgtgttatgaattcttcatctcttctatgatgaggaagagcatagtgcttgccctcatatctcacaccaatgaatttttctttaaagcaccactaaggagtttacagatagacaggaattgtctgatgcaattcctgaagaagaagagtctacaggtgagagactagttgtgctaaagagggttccactttgctcagctttctgagcaaagatacctggccaactgtagaccagatatgtgtctgttaggggagtgtatcatggctcattttaacagagacccatacaagaggagtgaggtgacctcaagtgcagggttgaacttggacactagagtctaccagagaaatcttaaatagccagaaggaacaggtattgtccatgccaggcaagcagctgcatatcttgagtgtaaatctctgcagaacctgcagaagggcctgactccaaaaggagtcagtttcagatatctgcaaaactcacaaaaaatcaaagctagatataaatctgcaaaaatcaaagctagattatcaatgttcttactcacggcagatcttttctgtcttacattgcccttccctctctcaactccaggccctatgctcaaccctggagaaccagaggcttcatagtgagtagaggaggaggagtcaaggaaaatgatccaaagccaaccaaactttttttccccatcacagattttccagcctgaggcaggcttgggctgagggaaggaagaaattttcaaaaggatttgagattgcattagattgcactggaatttttcatatttgaaagtattcaaaaaagttatgtcatctgcttagagttttatccaggatctaagaaaaatcatttgacagtatgagttaaatacgaattggttagaaagactaaatttcctctcttgcacctgctgagcccaggccattcagtaaactgattacaataatatgaataattatacattattaatgatatattaataatgatagtgatgaatagctaacatttatcaagtgtttacaacctgctagatactcttctaatcattttatctgttttaacctctcagctggagatacatatgaaactgatttccgtctatatctgatttagttagataactggatcataaagctttgtcagtcacattggaagatccaattatgcctttggaaaatcattatctattatttattaaacacacatatcaaacatttcacatgcattattgcatctactactttaacagtactatgaaaatattactgatttcatccacgttttagaggagtaagttgaatttcagagatgtgaagtcaatttgcttgatcgcagggctaggctggtaatacagggctgtcaggcctcagtgctttgccctttatcaataccctacatcagaggaaagataagaatcacctgttttctctttttgaaagaagtgcattaattacaaatgttttgttcaagcaaaataaaacaaatggtatatctgaaccttgtaaaccactttgagtactgaataaaaataatcaatattaaaattagtttcttcttttgacttatattgatgataaactcctcactttagtatggataaaagggtatacaagaaatggtttaaattcatggtcaacctgtattattacaaaaatactaaaaacaaaaacaaagggaagtcttcatttctgacccccttgagtacttctgaccctccaaatcttcttcctctccactttatttcattgttgtttttaaaatgaattccaaaacccaagagagggataaggctcttaccaagaagaaaaggaagaagctatgtggttacggttcagtgtgttctgaacttttgaaatttggggcctatttatacttcaagacaaacagagatcatgttaacgacagcagatgttgcaaggaaaggatagagtttattatagactggtctatgtggagtcagaagcaataggccctttctgtggaggaagttgggtggcagctacaactcgactagataaagcttattattttactgtgatctaggctgagagcataatgtggtgcaatctctgttggttagattcacatgctactcctagtacaatttttttggctagttccaggcattacttccaaaaccatgtaggttgctcaaatgcaaggaaaatacctaaccattgtgaaaggggtaggagatgcctcatatttgcaaatatgattggaaacatttatctttcttttttccaccacatcttctaaatattagcatttaataaaatacacatttctttcatttattttgaactccctccaaagccagcaaataccagaacctcaaatgttatgataggataggttctttattggtttgttttcttttcattctttctgtttttactgtgtgactctttttcattataaatccttatgtttccaactcaaggagcctgactaatcagaagggcttccagcagaggtagacaaatattctcaacatggtcctgagaccctacagatgcagatagctctgctattcacaggaaatgaagaagtcaggtccatcggagacaggggatttcctcttcagataaaatatattagctgctgcatattagttccataaagctcagggatagagacaagatgatttcagctggtgagggaaatggcttcttcttgtcctgaatgccactgaaaacagagcctgggacaaagacttgcgtataggttatttatttgggagatggttccagggaacaggagtgggggactgcattagtgaaacaaagaaggagggaaggcaactcaggatgcctacaggaaatactgatcttgtgaggctttctcaggatccttatgaaatttatcccaacactgcccatgggaaaaaggagaagggacaggttcctgtctctgattggttaaagtatccccaacaccaacacttcttggttgcacacgtatgaatgctaagtggttcatctcatgcagtaacatcagagaggcctggggcagaaggcaggacactgttagcttcctcctgcatggaactgggagcctcatcagtggctaaagtaaaagatgagaccaagaagatttgaagtagcacacaagaggtacctgatacagcctcctaaggaaatggttatgatagtattgttgttcatagtcaactcagaaagatctgaattgagatcccatctgttgcacatactagctgtgtatctctaggcaagttatttgctcctagcctcagtcttctcatttttatagatggcgcttacctcatttggtttttgtgatgagtaaaaacattacataagattactgcctaatatgttgcatatattcaataagtattcaaattttatattgagtattgagtgtatattcaacacatattcaaataatatattattagtaatagatatatatgtttaatgagtttggcctgggtcccagaacagtggtggcaaaacactatttagagaagtgaaaaggaaattaaaagatgtagaactcatatcttccattggatagctaagattcatgtataaataagtacaatatagatttctgttaggtgaatctgagacgtgaagattccaaagtgatttcaaagtcattaaaaaaaggaatgcaatataaatatgatattttatgtttaattttatttacatttatggaaaaatgttcaaccaggactattgatgatttcaaaggagccttatccactgcaggaatatttgcctctcttgtcatccatatttatatccataaaataggaatgttgagccagaagattcccaaactgaactttaattcaattctatatctgaaaataatttttttttggttgagatggagtcttgctctgtcgctcaggctggagtgcagtggtgccatcttggctcacgggaacctctgcctcccggggtcaagcaattctcccgcctcagcttcccgagtagctgggattacaggcagccgccaccatgcccggctaattttttgtatttttagtacagatggggtttcaccatgttggctaggatggtcttgatctcccgacttcaggtgatccgccctcctcggcctcccaaagtgctgggattacaggcatgagccaccgtgcccagccaattccttttaaatcagtcctgcacattgactagctagaatatctgttttgtcagttatgtaaaaaaaaaaaaaaaatgactaaagcatagatgtcaggtacacacaaaaaaacttactgtgtatttattcattaaatgtaattatattgactgttccaaactcaagatggatttataaaagttggttatttgcaatgtatttcacacaatgaccatgttaaaaatcataggaaaacctttacgtcagtgaacaaaagtctatttcaatcataatattccataaacacattttactaatatttttctggattctgaacagtatgtgttacaatgattctttttcccatagaaagagtgctgtcttttgatacaaagatcactatcatttctgcaacaatggtctctagaaaatcttcccaggggttgggcttaagaactttttccgagtatcctaacttcctccgaagtgagatactcttgagagggaaagggaaaacagttaataattttgctgggacaacaagaataaatcatcactgccctgaaaaacatggggatgtgtggttgtcctagtcatacacccctggaagtgtttccatggcctttttgtggacaccagcaatatggaagctgtcatttgttttcattttcattttggttcattcaacaaatgtttactgagactctaccaggtacaacatacttggaatgtagtgtgataaaggtgaacatggtgcttgactttgaagagctcatagtctagtgtgaaaatgagacattaaaaaactgattgtaatacaaagcacaaatgtgataaccaggaaagttcagggcatcaagggagcacgtagtagggggacctatgcttatgatctaaggcaggagttagcaaacttttctgaaaagggtcagatagtaaatattttagtttttaaaggcaactgttttgggctagaagggccataaatggtcttcatttctccttctcctgctctttcttccctttctcctcctgttctttttctctttttcttctttttcttttaatatccttttagaagtttaaaaccattcttagcctgagggctgtttcataacaagccatgggcaaattggccctatgggtcatagtttgtcaatatttgatttaggagagaagggaaatcttcttggagcaagtgatatggaggttgagatttgaaagacaagttatcattgtatagaaagagttgttggaaaaagtacatgagatggtgggacaatctgtgcaaaagcccatagattagagactgtgttgtatctttaacaaatgaaaagaagtccaacctggctggagaatggaccaagatgatattggaacatgaaatctcagttcccagaatatataataacccatgttaaggagttgggacttgattctaagggcagtaacacattcataaaggattttaaatgaggaaatatcatgattagacctgcatgtttaaaagagtattctgactgtgttgcagagaatagattggatagggacaagagataaatcagcaagttcagtacagaataatgacataggagataatgaggcagcaaatgatgaggatgattacatgagaaatacatggattccagtgagatttgtgaagtgaaattagctggacttcttgattgattagaggtaagagatgaggaaaagagaggaggagggagggatgactttgaggttgctccttaaacaactgagtggctggtggtgccatgtactgggagaatcctgcaggagaagcagatttgaagaattcagttttagacatattgaatatgaggtatatgatagtcatccaagtggtgatgccctttaaggaattaaatatgcagttctgaagtttacatgacaggtcaaagatttgaggatcaccctgtagatgtaaccaaggctcagggacagaataaaattatgtgtgcagaataagagccccccaatgttgaaggaatgactagacaaggacgatctcacaaagcatattgagaaggagtagacagacatataggaggaatacagggtaattttagagtcaccaaattcacagaataaaagcattccaaggtgggtgggatgatacagtatcaaatccttcaactagggaaaaaatgagtcctgagaagaaattattggatctgataatatagactttattgataatcttgatacaagcagtttcagagaagtggcatggctggaagtcagacgggaatgggttgggggtaagtgggagtacgtagggatggtgagagtaaaacattttaccaagaagtctagcaagtatgaaaggttggaggaaaaaggacagagtggtagctggagttggggaaaggatctgttaagatccaggaggtcttagacatgttttaatattcatgaggataagtcagtagacttagagtaaaagtacgggagcaagatttcttgataaattgggaggatgtgggtttcagagcacaggtggaagaaattgagtttgccaatgaggccagcctgtactctgttcacctggtatgggatgcatcatactggaggtgccttgttcacagttgcaaaaagtcaccctgtaggctagagggccttttgcaggaataggaacatcaaatgaggcaaaagaaagcagaaaggatgagtgaagatgctgatggatttattttcagataccatttttagttcaacattctttcttgggacagtgtcacatttttaatttggaaatcactccccagcatacttaatgtcaacaaacttatcaggctgtcatggtagcaatgatttcttatttattgattattataaatatacacattgatataaagcaattcttatatattcagcaattcttttaagtgaacatgttttagtaatcaccacacagataatcaaatttgaaagaaaaagtgtagaaatctattcatcaaattaatatttttccagtttacacaatgcttggctagcatatgaattctcaaatcctttgcaataattttgagagttcaacttatagcaacactgccacatctcagatcatcagagccagggtctgagctcaactttagagaaaggcaacctcacatataaaagctaatggtacttcgtcggctttccagagaattaaagtaaaattcaaaatatttcagaggagaatcagattcacacttttctagacatttcattacaagaatttggcttgggatgggactgtagggaaaaggtgttaatggacagatgacaaaatgggacagagtttagggatggaagtggagtatcagtgattcaatggatggaaaatagttttggcatttactgacccctcttccacttgttcctcctccttctgctgctcctcctttccctctttcacctccctctttcattagtcatgttaccctttttttttttttaccatgggagaattagagatgatatatatataaagttatccttgacagggtggggaaaggattttcaatttgtagcagaaaggaagggcctacttgggctgcagtatctcttagacaggttggaagcattattttcagtttcttacatgcataaagggccatatgtagattgcagatgcataaattgtgaatgactgcattcaatatgtaagtcaacaacactgttcctgtggacctatgatcagaagaaagaaattgggatggagacagcagcagacacaacaggcaacggtatcaatgagctgtttcaattgtgaaaaaatttcgagagaggaaagtcacctagtaatcattatcaggctttgattttcccaagtccttcctttacttctatgattatacatttagggaaaattacaaatgatctccataagttttaccctggggcatttaatatctgtaaatgctatctgtatcaccgaatagacttaattttcatccaaattagtattaagtttatttaattgaatttgtattctaaaaattgatactctgtgtataatgcctgtctgtatataagacataaagaataacttcagctagccagcacctgtgattaatcacaattgcccttctctgcccatgaccatgaagcaggcaaagattttttttaatttttattttttggcttttgctttatcacttcccctttctacttcaagcatctatcctagcctcatttccagttgttactggatgtttgcactttaatagaaaattgctgtcagtaaaaagcctttaaggtccaactaaatgaatcttagtggacttttagatggaaatggggccctatgggagagacattttccagagaggaacagtcatcaatctgtgctgctggcattgcaggtgtatcgtggagttctgaggagtagctctaatacagggtctctacttgtgcagtcaaactatttttgaggctctttgacccagaatccccctggagctactgtcatattcttcttcattgcttcatagtcaaatttcttaaagaggtctgcccacattgactcttccttacctcttactcaccctctcctcactgccatgggcttttcccctcatcacttcactgaaattgcactggcaaacattagtcattgctaaattgactggtattttgtccttactttatgatctctggggaatttgacaccaagtccactccctggttcttaaaatcccatcctcctttgatttttcaaggcagtgcactctcctggttcttctacttctcggtactgtagtaactgaaaggtggagctgggttgggaacataatgtccacaacagccctcattctttgatatggacaactgagttttctcaattatttgattaaatactctactatgcaaacaaatcttcaagccctcttctgacctcattgctgatctcagtccttttgaaataggagtttgggagccaccactacctcagacattgcctcctcttcatattctccctctgaatcctcttctacctatacctccaatgttagtattctctaaagtttgtctttaactgccttctccttttcctcttaatttttctcctcctgatcttatcaaagcccaggccttcaactatcaggtctgtgatgaagatcccaaatccctatctctaacctagtcttacccttcatccactacctccagatctgaatatccaactattttacctagacaacatctctgttccacctgttttagaatgccttattttcaacagtacactctccacccagtctcccaaattagtagtcacccttgactgcacctccctcggttccatccttcacagagtcacaaagacttgcaaagttcttcttcttaatagctgctaaatccatcctttcttcttaattttcttgctactgctttggtgtgagcttttacctgagctatagcagtaaatactgttcttcttttactagtctaaatgtctataattccacagtctacagaaagaagtgctcttttctaaaatgttaatctgattatgtaagtgtctgtataaaacttgtactggcttccctttatcttatagaagaaaatctcagttcattggtataacatttgatgtgctttgtaatctaacctctatcacaagactctggtctccttttcaggtaccactctcctttgcagtatgataaacactgcttgttgcttgaggcctctgtacctctgggcaatatgttattctggttttgtctttcgtttgatgggtgtctatgctttatttaccaatctagaaaatagattgcatgccagaagagattgcagagtaaactccctttctacaggtgttggttgactaaaattgtcagagggaggataaagaaagatagaagatgtagctattctgatctcattagtgcctcctgtcagtattggcatggctgatgtgactctgaggtagcaacagacttttggaaataaactagctacccttcaaatgaggatcactggagcagaaatgtgaatggtctgcattccctccaaaacagtagagcatcttgacttatatttatgtttatttccagatgagctttccaggaattaaaacacaaaatgtgtaccatctgcatccttttggtgtagtacagggagatgctgaagtcatcatgtagttgatatttgaagagaaaagtttgcaagattctttaatatgtcatcaatcaggcatgttgctacattttaggtcatagtttacaacagacctccttgggagagaggagacttgagactttggtttccttctgaatttagataataagtatgtggctttggtagttcattgcctactgtatggcacactggtttaaaaaaagataataaaattatagttattcccctccttcttctggcttggaattatattgaataatctggattttgtttgtttgttttttgtcaatcctcattttagtgcttgagactgctagggggaagttctccattaactagagccctcaaataaccagaatcataattgccaggagaaaagaaaatgcactgtgatagacttagtaaaaaaaatatagaaataaagtacttcttgactgtatcctcacagtcccttctgattcaagcaaattactggaacacccaccactataaagctattaatatataatgaaaacagatcagaaccatcattcagaagcaacaaaaggatcctcaatcaattagacactctgaaggcccagcgtttttattactaagaccacaaggggagaaatgtacctttttagataaaccttcaacaatattttcataagtccttcatctttgtttatgtagcactttctataaatgtttatggagcactctgtatacagacatttattgcagcacacattacatgccatcattgtgctttgtctatttgtcttttcctcttacattttagtgctttgagggcagggggccatttatctttgtttccttgttatctagaacaaactacaggaaagcttaacacctatttaattgaaggtaaccgcaagcaaaaaaaaaaaaaaaaattgatttctgataattctgaatcccagaaaaaatttggtacatttgaattatctattcctttttctttctcttttaacagtgcatttattaatttattatttaatttcttatttgatgacattcaaatactctctccatttatcaaaagaattttgatattttaaagtacctttcatagttctcattctgtctgcattctaaatttgctttttctagatcttggaatcaaagtttcttgttcagttattaaaatttgtattatattttaattagtttctaatttgtaccaatttctcagaaacacttggtaatttcattatttggaggaacagttggtatttggttacatgagtaagtcctttagaggtgatttgtgagattttggtgcacccatcacccgagcagtgtacactgaacccaatttgtagtcttttatctttcacctgcctcctatcttttcccctgagtcgccaaaatacactgtttaattcttacgcctttgcatcctcatagcttagctcccacttatgagtgagatcatacaatgtttggctttccattcctgagttacttcacttaaaataatagtctccaattccatccaggttactgcaaatgccactaatttattcctttgtatggctgagtagtattccatgacatatatataatatattatatattatacgtataatatatataatatattatatattatacatataatatatataatatataataatatgtatttttatccattcgattgatgggcatttgggctggttccatatttttgcaattgtgaattgtgctgctataaacatgtgtgtgcaagtagttttcttgtataatgacttctctattctgtattgaggtcttataaaataaaacatagtaattacttccacaaattttattgtttgagatatgattaatatgatataatttttgaattttatcaataaaaatgtggaaattaattttctcttttaataagtgtgtacataatatccttgatttttcctcttggccacaaagcctaaaattcttactctttggtctcttatggaaattttgctgacttctgcactataaaatactaatataaacttatataaagttggagaaaaaattagtttctaaaaatctttccaatgcaatatttaacactagcctggacattgaaatcatgaattctgtgtctcacctatatctatttctaatccttcttttgtatcttgttttactttgcatagggctgaatgaataacaggtgcttaatgaaaactggttaattgatttatttctctagctgcccagttttaggaaaatattttgctttatcatactggaatttaactaatggaatgctaaaaatgcaatgtaaacatgagcatttataatgaggattattttaaatgacttggctctactatgaggaatatgctcagaaataaatgtcagaatctttggacagacttaactctttaccaaacattagaagttggtgacatctgtgaatgattgactggcaataatgactcaagcagcctaagagattctttggaatcaatgtcaggccaaataggctaattttttgcttaattctagtttaataatttcgaatatggcattaccagtgatactcaccatgaaaatttttttaaaaagatctcaaaattaggaaactatatagcaaaggaaattgcattagataaaatacaacccagagttaatgttttagttattcaaaatttatatctcaatgaaacttttctctttttctgtttttggttataggaaagtcccataataattttagttgttaaagagtacattttcagctgccaggataaggtgggttctattgtgaatccttcctaaatttaacttgaataaaccagtcaagaatttaatctttgtttgacaaactaattggctggggtttagaaccatcagttatgtaataaaactgtatgcaatcaattagggtggactgattatgttcaggcgacttcatttctgaacaatcttgttagcagttgaactctttgagttgcttgcctaactcttagaaaatgactcagccttttatataagcatggggttttttaattctctgcaaatttcagaggcttttcaggtaatgggctgcattttaccaaagaaagcaatgttaagtgcatacagaatggttttggcttattttcccttccttggcgaatcacaagttagatattaatctcagattcctcttctggatgacccaaatgaggggctggggtgcagtaaactagtagtctgagctggggagagattcaatccttggggggtgctattgtcttccacttggaagctgcaggtatgatcttgaggcagtgacccatcaatccagaggaattagagaatgaaaatcctagaatgagccttaataaggagatggaatactgggaatctggacaagagggtgaactttcagagaaagaaggtggggaggagattgagcttggtgaggttgtgtagccagagaggggaattgagtgttagccattgatgacattcaaatactctctccatttatcaaaagaattttgatattttaaagtacctttcatagttctcattctgtctgcattctaaatttgctttttctagatcttggaatcaaagtttcttgttcagttattaaaatttgtattatattttaattagtttctaatttgtaccaatttctcaggaacacttggtaatttcattgttattaaatcagaattatagcatagttaatgttttttatttatgcttcctatgagatgtacctagaattgatcaaaacaaggccaagttctcctaaaatatctttagctaatatactctatatacatccttagaatgaaaaattactcaggtaataataaattactgtttttacacacacacacacacacacacacacacacacacactccatatatatattccagaggccaaatttgttctatttaatactattcccagcataatagttctcgccaaatatttgttgaattaatgagtgtggttctgatcttcgtaatagcccaaaaagcatggagcacattttatagttagcacagatacaaaaagaaataaacaaatcatttatgaccattacagcttcctctgtcacattatataacccaattttagagaattttactggtaggagtgcaaaagtatacatacactatggaaaacagtttggcagttacttataaagttatatatatacttaacatacgccctggcagccctggtccaggttgtttaccttagagaaataaaaagttatattcaacaaaaatttttagaagaatgaacattcatagtagcttcatttgtgacagtcaaaaactggaaacaacccagatatccttcatcaagagtgtggataagtacactgtggactagtgttgagaagtaaaaagggacaaactattgatacatgcaacaacttggatgattctcagacatgcagagtgagagaagccagtatgaaaggctacacatcctgtatgattgcaactgcgtagcgttctggaaaaggaaaaactatagagacagtaaaaagaccagtggtggccagagatatgggtgtggtgagggtattactgtaaggggtagcccaagggacttttgggagatgagagaattgttttttgtcctgattatggtagtagttatatgaatctgtatacatttgttgaacttcatagaactttacaacaaaagaaaaaaattaccatatgagaattcagaaatgaaattaaaaatctctcagatttggataattgtttaaccaactgaggcttacttagagtcaagtggaatcttcttaggtgtttcataactggagaccatgggttttgaaagccatgatatagttatctgagaggtggaaaggtagaaaagtcagctacagtataattttttaaaaagaaatgaagtagttatgatcaaaaaggatatttgcctataattattcaaaacgcagagttgcgagatcttgttaaaacccatcactttattgtccatttatggggacttccccctctggcactgattcttgcattaattaatataatagcatatgaaagaaagattagaaatgtgttatgttagaaatagacttgctttaagcgacatacatattgatacaccaggaaaatttggactattttcttactgctgagattttttttcacccactctggagtccactggaaaccatgtatttattaaatgattgatgcttgtgctccttaggaaccatgggaattaccatcctagatcagatcattagtctgcctagtctaacatcttgcttctggcttaggtaattatctgaagcttttgagggacgtttaactctttcttgtaaagcattagaccagtgtttcatgtagtgttaatctcattgttgaagtgtagatgagaaacccatgctgatgataatcataactaaattctttttgtacttttaaaatataattttgtttttaccattttaatgattctggttagatcccaaataattaagaatgctatgatatacttcatctgattcccaaggatttgattttctactctgcaatgagtctgtacgaatgggaatacaattattctgtctagtctaatgggttttatacctctagaacctcaacattttataagaaaagcaaatcagcctcttcctgtttgtaatatggctgttcagacctgtttagtggtctctgagtgaattatttccaaataattgatcattgataactcttaacacagttactttgtaccatttactttctaacagatgacttgattcgttaagaaagggatgatttaattggctaatataatgtgatcctttccttacttcctatctcctaggtatttgttgaatgtataagcattgttttagtgccaacagcaatgtatttagtgtttacaacttcttaatgaggatttaaaaaaagtaaatgccaggtaggagacaagccatattgcaaatgcccaggaattgaaatttgggcatcctactcaataagaatgtttgctgttgttgtttatagtcagagttctggctgaggtgttaaaatgataagaagtcagccatgctgcaagagcagtaagaaacctaagaacagggtatgtgaagaatccctctgtagcactgacttctcaaccaggatgattttgcccttcggggacatttggcaatgtctgcagatattttcagttgccacaactggggacacgggggtgtacttatgggcgtttagtggatggaggccagggaggctgctaaatatcctatgatgtacagaacagcctcatacaattttccacttcaatatctcaaaagtgccaaggttgacagcccccattctgaagtgaggagaatgtgttttcagcattgagcataatactttgaacatggtaggtgcagaatatgtgttgatgggattttcacaagagacctctccaatcagatttgattgcaattattgtaatcaaagtaattgcaaataaatgctaatctaacacaaatttcatgacatgcactacaattacctcacagcgtgtttggttaggcacacatccaaagcactcattaagaggacaattactagtatcctttatatttatttatttatttatttatttatttgagacggagtctcactctgttgcccaggctggagtgcagtggtacgatctcacgtcactgcaacctctgcctcagcgactctcctgcctcagcctcctgagtagctgggacatcaggtgcgtgtcaccatgcctgggtaatttttctatttttagtagagatggggtttcaccatgttggccaggctggtttcaaactcttgccctcaagtgatctgctcacctcaacctcccaaagtgctgggattccaggcatgagccaccacaccaggcccaattatgagtatccttttaaacctgtgagactaaatactgttttcctctcttctcttttacagttaattttcaaggattggtcgtcagtttggtttattttttccatctcccactatcaatgacacacgtagtttctggacctcatatcccatcagctggggctctatcccacgcacagttctctagggccacattcccctgtgttccacctctaacctggcttgctcatcccatccttagctgttgatcctattaaacttcatggattttagagcaggatatccatttgctttgtctctttctgttctgaaaataaactctttataatgagatagaaaacagtagggtaagagttctggagcaggagatgattacataatggatcaggggaggttgcacagaaggggttgagtttctcagtccttggtttgagacttaagatagccactttctagacatttggacagatttttgcttagttgggtgatattcatgatggctctcgtgaaccttgctctactgcttctgagaactaaccttctggaagcttcagccccattttcttctttccagggatcactgatgtatctatgattaaagatcagctaccattctctgctgactttgtgtctgcccatcacttccaaatctttaaagcagaactggctgcagagtagccttccaagtgctacaggtttgcaaacaatgagaagagacttttctaaaaaccacagcactgcttgaaacttggtgctttaattcctttcagtccacaactagagattttttaaatgttcatatttgtaaatgcaaactgagtgctagcttcttagaagaagtttttattacaattcaaataaagatgacagattctttcttctgaagaaatagatgtagttttgggagccccagtgtggaacaggttatttttcaagaagcaaaaggaccatcaacgcaaacttttcttacctcaaaatttcactttgggcttgtgccatttttcttctgctcttcgtattcaaatgtacaacagacacaagatagtaaaggggggaagagagggaattaaaaatttcatttagaatccctgttacataaagaattttttctaccttttagcctctacaaaacgtagaaatttattgttaatatatttttcagagatattcacatatatccatgttgttattattttaaaccaaggatataaggcagccatcagtcatcattttcataacctataaaataactttctctgagtgtcaagagtatcagtttttgagtgtcaggtaaacacaacactgcttcaagctgaataactatagaaatgaatcctaggaatatgttacatagatacaaattatgtcctgattcctaccaatttaataaactatggacttaaagatttcttcttcttcctcctctccttcctcttcttcttcctcctcttcttcctcttctcctcctactcctcttcatttttcttcttcttctctggcaaagcaatatttatgtttcaggaataacagtattaagtgctatggagaagggttagagggttgagattgaggttacattataaagacaagttgaaagcttcaatttatacttgagaataacaagatatgaaaggattttgagaaaatcctttgttcattagataatgtttatttaacaagatgagtgttttcaatgagattatactgtggattttattgaaaagactttaagaagtaaggtctctgttctttaaatcctgctgatttaaagaaatattattaaatacttttaagtccatttttattcagctttgtctacttgccattggttataatagacttaaaaccttaaatcttattcctttattcttcaatttttgttttaaaattttggcaacattgttttctttgtgcttgttgttattcatagatcccagcagaatttccaattttttttatagtcagtgccattggaagaaaccataatatcattgtcagtgggaaatctgttagcaaggaaatctctgcagtgacaatgtggcagtacagctgtgttgtcttctgtgggtcagaagtgatgtgactgtaccactcagtttactcagcacagtctgtttatacacacagtcccaacataattgtaatagcaccaactcttgatttgaacagtaaaattttgtggttactcacgacttacaaatctatatggaaggttgggtgcagtggctcatgcctgtaattctagcactttgggaggctgaggcaggtggatcacttgaggtcaggagttcaaaaccagcctggccgacatggtgaaacctggtctcaaccaaaaaaaaaaaaaaaaaaaaaaaaaaggctggttgtggtggcgggcacctgtaatctgagctacttgggaggctgaggcaggagaattgcttgaaccagggagggagaggttgcagtgagccgagatcacgccactgcattccagcctaggcaacagagaaagactctatctcaaaataagtaaataaataaatttaatgaattaattaaaaaaagaaatccatatggaagagtggtagtggttttaagtggttcatttttttgctggtgtggtggaggtgtggcttgtgaaaaagatcagtaaaattagattatccaggatgagaccagaatgtagtagaatttttttggaactgagaaagaaaacatttgcaggcattgttaaaaactaacaagctgaaagcaggtaggagggagaaaatttaaaaaaaagcatcataacagcaagaatattaattattaagatgaagccaggtggcatggtggtggtggtgaggtggtaagagaggcgggaatggggtacctaggactcagcactcaatgctactttaagaaacttaactaattgtttatatagtaaaataatataatgtagaggtcaaggacagggggtttgaatcagattgcctgggttcactttctgcaagctacttaaaagtgaaaaagatgcttaagccctatatgcctcatttccctcatctgtaaaatgggagtaatagtaatacctttttattgtggagattaaatgaattaatgcttataaagcacttaaaacagcagttgtctcattgtaagcactcagtcactcagtacatgtcatctggtattattattgttgttattgttttcaatgagcaaaggaggtaatggctataccactgccatcccatgtttttaatgaagctgcccatattgtcttctggaggcaatctcatccgctgaaccagctgggctggatgggttttctgtctccatcacttatttgttcagcaaatttctgaacttctctttagtctatctctacatcttgatagagataaaaataacatggactatttaggtttattgtaatgattagatttgctacaatctttgtaaaccacttcacaaggtcccaggcacatggtcagttctaggtaaatgttagaagttgttctaaagaaatctttttgtataaacgtgcctgtataataaggcatacataagccatttgttttctgggtctcttaagtcaaataattgttaagtagtagatagtaagtatatggttcacatggaggcatggagggccaatgggaaagtgttatgtttgagccatgtgtgaaatgccttcatagagaaaagtggctgagaatacagttctgttattcaggacagatgatgattttggggcctattagtacatgaatctctctctccctttctatgtgtgtgtatgaatgtgcacttgtgcaggggacatatgtgttgacaaataactgaaccctgaagaataccacttcataaatgatcaggtcaaggaaagccaccaaaacagcaaaaaacaacaatacataccacagttgaggagaaacaaagataagagagaaataaggagatagtgatgccctaagagttaaatccaaagaacatttcaagaacagcaaaaaatgttataattaagtcaaaatgattaaatcagaaaataaaggcctctaataacattactgagaatagtgttgacagagtgattggggcaaaatctagatgtcagtggattgagatttatcaaaaacatgagaaaaattaaacaataaatactaatataaaacaaaaccataagaaaacttagcttttcaaagagtttgacagtaagtggaaaaaaaagataggtgatgtttattatatagaaaacttatgcatctgtcagttgatgggaagaattttgaacatctaagaaatgggaaaaaaatggacgagactaacttgtgatgttcaaggaggagtagactgggacaaggtcacttgtgtagaaactatacctagggaaaaggaagaataaccatgtcggagggaggtaaggaagagtgaatatttttaaaaggttttggtaaaagtgtcctcagatttgtttgagaaatcagtgactaagtcatggaggtagaagaatagcaagaggtcaaactttgaacagaaaagaattttaactagagatgaatggaagatgagttgattagtactgaaggctcaattaaggttggaaataaagcatttgtgatagcaccaaatgacacagaactcagtggtgtgtgtgtgtgtgtgtgtgtgtgtgtgaattatgtgattttctacagaattcttaaactttccagaagcaaaagtgatggcagtggatacatagctttgccaagaactggggattttcaatgtgaacatgggagaagaatgaaggttgagagattgggaggagtgagaatacttatttgagcattaagtgaatgatgaagaaaggagttgctgttaggtatgaaatgggaggaagcccagaaagggctgaacaactgaagactagagtgaatgtggaaaagaaggaggtttgactggagagacaagtttccttgtttagtatgttggagatggagggttcgtaagaaatgaaaagagccagcgtttgccattagattgggtagtagcttggtgatctctaggtgataaaatacttttggtggtgaatgctgaaaggcacatcaatgataatttacttaatcgaatcccacttttttaaaacttttaagctcaggggtacaagtgcaggttttttacataggtaaacttatgtcatgggggtttgttgtacagattattttgtcacccaggtattaagcctagtactcattggttatttttcctgatcctcttaattcttctaccctctacccatcaaaaggccccaatgtctgttgttcctgtctacgtgtctgtgtgttcccctcatttagcttccacttataagtgagaacatgcagtatttggttttcttttctcatgttagtttgctaaggataatggccttcagcttcatcaatgtccttgcaaagcacatgatctcattcttttttgtggctacatagtattccatggtatatatgtaccacattttctttaaccaagctataattaatgggcatttaggttgattctatgtctttgctactgtgaatagtgctgcaacaaatatattcatgcatgtgtctttataatagaatgatttatattcctttgggtatatacccagtaatgagattgctgggtcaaatggtatttctgtctttaggtctttgaggaataccacactgtcttccacaatggctggactgatttacactcccaccaacaatatataagcattccttttttctccacaactttgccagcttctgttattttttgactttttagtaatagccattctgactggtgttagatggtatctcattgtggttttgatttgcatttctctaatgatcagtgatggtgatctttttttcatatggttgttggctgcatgtatgtcttcttttgaaaagtgtctgttcatgtcctttgtccattttttaatgggattttttttcttgtaaatgtaagtttcttatagatgctggatattagacctttgtcagaagtatagtttgcaaaaactttctcccattctgtaggttgactgtttactctgttggtattttctgtttctgtgcagaagctatttatttaattataccccatttgtcaatttttgcttttgttgcaattgcttttggtgtctttgtcatgaaatctttgctcatgcctgtgtcctgaatggtattgcctaggttttcttccagggtttttacagttgtgggtttcacatttaagtctttagtccatcttgagttaattttcgtatatggtgaaggaaggggtccagttttaatcttctgcctgttgctagccagttctcccagaaccatttattgaatagggaatcccttctgcattgtttgtttttgtcaggtttatcaaatatcagatagttgtaggtgtgtggtcttatttctgggttctctcttctgtttcattggtctgtgtcttgttctcgtaccagtactatgctgttttgattactataggcctgtagtatagtttgaagttggatagcatgatacctccagctttattctttttgcttaggattgtcttggctattcgatctcttttttggttccatgtacatttaaaaataattttccctagttcttttttttttttttttttttttttttttgagatggagtctcactctgtcacccaggctggagggcagtgtcatgatctcggctcgctacaacctccgcctcccgagttcaagcgattcttctgcctcagcctccggagtagctgggtctacaggtgcatgccaccatgcctggctaatttttgtatttttagtagagacggggtttcttcatattgaccaagctggtctcgagctcatgaccctgtgatccgcccatctctgcctcccaaagtgttgggattacaggcgtgagccaccacgcctggcctagttttccctagttctgtgaagaatttcaatggtagtttataggaatagcattgaatctataaattgctctgggcagtatggccatattaacaatattgattctttcttccataagcatggaatgtttttccatttgtttgtgtcatctctgatttctttgagcagttgttttagttttggataaaaaaatctttcacccccataattagctgtattcctaggtattttattatttttgtggcaattatggatgggagttcatttgtgatttggctttcagcttctctgttgttggtgtataggaatgctagtgatttttgcacattgattttgtatcccaagactttgctgaagttgtttatcagcttaagaagcttttgggctgagactatggggttttcaagacataggatcatgtcctctacaaacaaggatagtttgctttcttctcttcctatttggatgctctttatttctttctcttgcctaattgccctggccagaacttccagtactattttgaataggagtggtgagagaggacatccttgtcttgtgccagttttcaaggggaatgcttccagcttttgctcattcagtatgatgtttgctgtgggtttatcatatatgactcattattttgaggtatgttccttcaataattagtttattgagagtttctaacatgaactgatgtcgaattttatcgaaggccttttctgcattgattgagataatcatgtggtttttgtcttcagttctgtttaagtgatgaatcaaatttattaatctgcatatgttgaaccaatcttgcatcctgaggatgaagactacttgatcttgatggataagcttttgatgtgctgctggttttggtttgccagtattttattgaggatttttgcatcgatgttcatcagggatattggcctgaagttttcttttttttgttgtatctctgccaggttttggtatcaggatgatgccggccttatagaatgtgttagtgcggagtccctcctcaattttttggaattgtttcagtagaaatgttgctagcttttctttgtacatctggtagaattcggctgtgaatttgactggtcctgggctttttttggttagtaggctatttattactgacccaatttcaaggtagttattggtctgctcagggattcaatttcttcctggtttagccttgggagggtgtatgtgtccaggaatttatccatttcttctagattttctagtttgtatgcataaaatagaaaacactggaggtgtttataatattctctgatggttgtttgtatatctgtggggtccgtggtgatatcccccttgttgtttctgattgtgtttatttgaatcttctctcttttcttccttattagtttagctagtgatctatattatttatttttattaaaaaaagaatagctcctggatgtgttgattttttgaatttttttttttgtgtgtgtttctatctctttcagttcagctctgatcttggttatttcttgttttctgctagctttgagatttgtttgctcttggttctctagttgttttagttgtgatattaggttgttaacttgagatgtttctaagtttttgatggtgactttgaagtcctgagagggaagacaacttgtttaagaatagcaaattttgggacaactgctagtagaacccaagtccaattctccccaatatggggttgtgtttaacaaaccaaggcattttatacttaaatcagtcaagtactgattcattctgtgaagggggaaatactgtattataaaatggctctagattgtgcttacgaattaataaacagatctctttctgtgcacttcatcagataaattcatggtgtcaaattctagcagcctactgctgtcaatgacatgtacatcagagtgaaaatgtaatccaggtgacatatgacataaaaaagtcacattgcctagtaccagccctttctcaagtctagttaattagtagtattttttggttaattcaagtggatggatctcaaggcaatactatttgtagaatgcaatctgatactgagtattaatccacatcgtttgaaaatatgaaaataattttaggatctctttggagattgcagtgtcaaaactgaactgatttactaactcacaaattcatcctctatttgagaaacattagttttattaccaacaccaagagcatcatgttatgacaagaacatcatgttatgacaagaacattagacacagatgtcaagagaccagtatttaattaattcactttgtctttgggcaagtactaaattttaagaaactcagttttttcatcaggcaaatggaaatcccacctcttatttctgccttttaaagttgttgtgaagggcaaatgataacaggtgacatggtggcaaaatgtgtgcaatggtggctatcatatggcttcaggccctgctggccactgaatagatgggtgtctatggatatttaacaccatgagcttaggtttagttatctgtagaatagaaatacaggaattatctttcatgttgtcaacatttatatataatgcatacaatatagctgatacagaaaaggatctattattaacacataatggcaagagttattattagtacttaacatattaaaatgtgccatacaaatgcaactttttttttcattttttatcatctgatttttgttgtattctttctctgtgccctatcttcatagagtactttcttcagacaatctgatttaattcatatgcctaactaacttggtgaccttcttgcctcatgtttaattcattcctctctgtgaaggaagggtactagaaatagtattatccatttcttccctgctcctcttttcccctttccttctcattcactcttgacaatgaaagaacttacatccccgtttttggtgccatgatttcaggagggcaagaacatcaacttttctgaaaaccaagagaaagtggagtacctgagaaaatgtaacttcatatctggcctctgaaagacatatgaaatatacagtccttgcaaaatatttttagaaagttgtccttgtagatttcaaacatgcaagtgagtagatcatagtttcaacttgaatgttcaatttcaatctgagcgaatcaggaaaattctagagttaatcattgaaaacgaatggatgcattaagtttattcaatttaacacatattactgagtctactatgtgcctggtgcttttctggctagttgtaaagtgtcaaaactagacaaataaccctgctctcatagggcttactttcttagcttacttagaggagtgactaagtaatatacataataaataagtaaattctctagtagattataaagttataagtgctatagacaaaagaaaaaatgtagagcatcatagaaagcaaaaagaatgcttgtacataggctgaccaaagtaggcctcactgagaaggagacagagaagagggtgtgggattgagccacaggaacacctgggagaaaagtagagagatctgccttggcagagtccccaagtggggagagtgcctgcagtgtgtgaggattagcaaggaagtcagagtggcttgagcagaatgaccaggaagggaattagcagaagacaaagtcagaggtaaagcgttctggttctttggaaagaagtccagcttttgttgtggttttaaagattaccaagtctaatcattttaatataaacagtagaaggatgatcatccttctttacaaggtgaacatgagttaagggttcaaaaaccttctcaccttgaatctctaggtaagatttaggtgctgtcatccaagcatgccatccatctaggacaatgctgtcaatttcagagtgaattatagaatgaattttgtcagccagtgatcagcagagaaagagtgttagaaaaatctttatagaaacttaagaagtgtcagacgtggataagtggaatggaatttggatggagttctgggttagacagcaggtaagttgtgcctaagtgctgttgagcaaagtgtctgcataggaggtatagctgtgttttcctgacagtgagttttccaaggctccaccatatcttccacccctcacaccagcagactgctaacctataaaaccattttttctaccaagtccttacatggcctggtaatgattcttaaaacaatactttggcaaccactgccacaggaaggtagcaaccctcctcaactaaaacaaagaagttgcttcgggaaatagtaaagtgaagtgcagggagcaactggcaaggggccttaggttataagttgaatcatgtaactataggccaacgtaaatgtaggctaggacctctggatggtgagataacgaaagggaccaatctcagaaacactgggatacaagagcaaaaattttcagattttatagaagtagtaaaaattctttaaaaaaattttttttaacattgttttgtaatatgagaacaagtatgctctcaaagaaattaacagtgggaaaatttaaaacaagtaagaggaaatacttctattcttagcgtataatcagcccatagacttttctgttgaagaaggtcagggagtcaaatgctgaagaggaaaagaaaagagaggaaaatctggttaattttatgaccaataataacattgtaattatgccctaagataagaataacgaggttgaagttttggggtataaaatgattgtctcagaggacaggaaggaattctcccactcttactcctaacagtttgaatggcctcaaagaattggccagatgtgtaatggggtgtaatattttcccagaaggcggcttctattgacccagaaaactattcttgaaagatcagtggctagttttatctggaaaatcatgtatttcagggaaaatcagccttaaattcaagcaaaaagaattttatagttggtgaaatgataaacttcccaatgatggatatgctctaattttgcttttgacccagtgtgtgattttctctaaacataatattcataaaactaacttagtgaatcataatggatggaaattggcctttgacacagagcaagtccaatggaaagcacatgaactgtcccataggagttataaatatgctcttgcccttttgccaaacttttctcaaaggtcaaaccagctgcttgtaccttctgattttgtttcttggcatgcagtatgctgcttaagtgcttgcttttcagaccttagtaaagctgtgaatccctagcagtctctaaaatcttctaaatcagttttaagctggccatcaagtgggggaatatctagcagggcaaaccttatccacagtcatttcttagtgaacttccaagagcacagaatgaagacaacgatgtcctatagatccccttggagcctctttaaatggtagctgtagtgtaggtcacaatgtcagattgcttgtatttttctcttccttttgcttctaaactaactgggacctcagcattatttgttcattgcctctctgtatgtacttactttttaaattttctttatttacataaaacatggatattgtatgagacagagttactccaattaacaaataatctccaaatctcagttgtttaagaatagaaaaactttgttttactcacatctcagcctgaagaaggttgggtgactctcctggtagctgccctcctggtggtgactcagggaaccaggctgcttctaacatttagttctgttatctcacagtccttcaagtacagctacaagttcaactttcttatttggaaaatggaagcaataaaaacacaccgctcagtttgctatgataattaaataaaataagaactgttggttgaaagactttcagaatagctggaacatggtacatactcaggaaatgttgatgtttcttctctcttggtttgtatatcgggcactggttgagtatatgggagcagaaggacatatgcaaaggtgaataaggctgatatctgtactcaagttgctcatgagctcattgtctctaaaagagaaggagaatttgtttctaaaaacatgactgagtaagctccatgaaggcaaacactgtgtctctcgtttaatttttaaccattataatctcaaagttgaattcattatcaggataatggcaaatggtcaataaatagtataaaatcaatgattacaatatcacaactatacaatggaagagctagaaaattacattctttcctctttttcctctgtattactcacactgcccccggaatttaccaaaatctgatgtgatggaataaaacctaggattactatgatttcctgagtctatgccatacatcatccaaattgaagagatggtcctgaagtatttctatatgcagaccatagtacacagctgcttatagttctttaaccttatatatggttgaaaataaggtacaattttgcttaatcaggtatactttcccatcctgagcctatatattgtgtttgttgtctgattggcatctgtaaatatattttttggtatttgttcttatagttccagccactactttgcctcaaagtttgaataaagcctttggtataagtaagccattctgtctcccagtgtttagtgtcaattgtgtatctctgtaatctagttatgttttctgactcaaaattggatcccgaattgtccttaaaatttgctcaccttgctgaattatgatacatcagttttcaggaggagtcattgaacttaaaggataacttagaagtaatttacctgaaatcctctgagccagaatcttatttgtaagaactctagcaaatttgtttgtaaaaaaatcttcatagttgatttgttcaactgactaaatggtatctggttgatctcaccatgtttcttattcactctttcttctggatcctatttattactgctagttagctgattgtttgggtaaaagcctcctttttcaatatattttcccctgccatgtctcccagacattagtacaaataacttttatgtattctccctgtattaggtaagtatccaggtatattgctttgtatgcataataaggaaactgaggtgcatggtagcctgtctgttttcaaagtcagcaggattaggaagaaaatcaactgaaattgacacttcaatctactgtttctattcctcaggtcacagagcttctattggtaagactcccctaggctttcccttctatagctgacacaaggaacattatactctcattttggtctccatcactttctgcctccaaaaagcagaagcagaggcaagctgttcactcaacttgccctgtttctttttcctccaaaggagaagacctggacatagcaaaatgagcaagcagagccagctgtgtgcatttttcacccatattaaagcaaagcccaaatataataactcattctcagagactagagcatcccaattctgggcttatgaaaatatttttacctaattacttcagtaatctgtgcgcagtatgtcaagtaaatttcatctttatatcacactggaaaagaaggcaaatttgaagagattcatagaactagttttacaaagagctttaacagagaatactgatgctcaggtattagaaaaagtgaatattatgataaattatgtaaagaaaacttgtgtttagagagaaaattgtgttatgtttctgttttcatcctaggtctcctggggacaaaagaagagttcccttatgttctttatcctcttccctgaagcaggagatagtatatatgttcggaggaaaagatgcatctaagaatattatagatgctgcatccatcagagtactgacatcctaacctagtctaccctgatgctgtatatatctcaacagcttaaaacaacaaaggcttatttctcgtttgtacttcttgtccatctttggttggcaggaactcaagctgaaagatcagcttccatctcatacttttctggtcactgtctcaagagacaaactcagaactcttagaacagagactggcaaacatgttctgttaagggccaggtggcaaatatttttaactttgtaggccatacagtttctgtcacaatttctcaactctgctgttgtagtgcaaagtagccataggcaatacataaacaaatgcgtatagctgtgttccaataaaattttgtttataacaatagccagtgggcctgatttggcctgtggcttgtagttcaccacctctttcaattaaatagtatggcccaaaagggacactagttacctctgctcaatggttaatgactagttaatgatcctattaactagtcattaagataccaataagataatggggaagtgcaaggctaggcttatatgtattcacacacatacaaggaaaacaatgaagaaatagctgagcagttattttcacagatctacatgcttgattaaggctactggtcttttaaagttcatctattcccttcagtgttctctttaactcagaaaaacagactttacaaggtggcagtatttatttgctagttaaggggcaatagcagtggttggtcaaccaaacatgacattgctaaggcctgtgtttattcagggttggtggcaatgtctggtctgaagagctggagttattcacagcattaaatcttcacctttggaaatcctaaggtgagttaggaaatacatcctagaagctgatcttgggaaaggatttggaagtagcaagggagccattttatcagatgacattccacagcagtgaaattgccttggggaaaaagtcatttctcatagatcaatttctgagaggtttcctagatgtagcaatgcagtctatacatgggcagcagtgacaaaatggggttttccattgattttactagaaatggagttgtacttaaacttgctttacaatagagggatgccacttatgtatttggttttctgtcaatccttaaccccaattcacaaccaaccgatttttaactgtatatttattctgtccccctactggttcttcattgtcttataaaggcatatgtttttttttaccctcagttaacaccctttcaagttttattggcattgctctcagagcaaaacgttaaccgttcatttatctttacaatagtttaatttgtttatatttgtgacttttcactatagtctggaagtttaaatatggagaaatgtatattcaagtggattttttatttaattaaaataaagacactgggaatctatagtgtaggtagcaggctgtctgtaataggaaattattgttcatgttgattactgtccataccttctaaaattttatggcactttcttgtaattgtcacacaagcaaaatacttcagtgaatgcattttaataattaaattaaaaacaaaaccaaaaccaaaatagaacatatacctggactaagatttattagtttgtgataactcttgagttttgctctcctaatcagtgatacttctgtgcaatatgagaagattctaggggcaatagttacttggccacttatgataaagtgtaaacacctttaaaagtgtgaaaataaccttcatataagaaaaaatttcaaggtccaggtgatatttttatttcaagtagtgttgtactgtaccttgaaattaatcgtaatggtttacatgaagctcctattatgattttccccaaaaagttttaaatttcatttctgagattagctgccaatatcaagccatcgtggaaaaaatttctagtactgctagagagactattttccaaatctctctgtttggcataataataataataatatatattatgctttagatactgttctgagccttttaaaatacatttaattggcacagacaccttaggagcttgataccgtagcattattattcctactttgcaaaggagaaaactgagatgcaatgaggccaagttatttgcctagagttacacagagggtaagaagcagagccaggatttgaacctaggcagtttgctccagagtcctgagaataatcactgtggtataacatctttcacagcagagacaacaggattggcattaagatgccagaggaagggtggagaaatgagatgcagagaaaatgctaatttcctttccttcagcaacttgtgtagagattttttgttcctgaataaaggcagtgtgaaaggaaaagaagcacttgtaagcttcaatttgctttcaatgggaatcaccgagttgggtcattattaccacctttcctttcctcccgaaacatcctgcttggcatttctaccacaggcttccttggaaattcttgactacctgagttcccatgcatgacactcttgccttgaaaagattaatataaaatatcagtcgaaggttttgtattcccagtgcagatctttatctcagaataaaaagggagaaatttaccttctgtgagtcatgggcactcaggagctgggaacattcccctggcagggagagttggcaaaaaaaaaaaaagtcctagtggatttcaagtttatttgactaattctttcaccacttgtcaaacgaaactacttttgtttaggtaacaaaacaagctgtttcctgtgccatttctccagtgagtagtataggcacttgtggcgaacacacattactgctaactgttatgatgtttgctgtcaaattcatttatttatacaactgctgcaaaaagcctgaggcccataagcagccatgaaagatttcagagtcatggtgtggggtcatgagagggaaaaaaattctccactggttatgagaaaggaactgacacaggaaatggtcacatatggcgcagatttattgtgtccggggcttcccattcaaatctcattatagccacagctcagagcagggcatggcacagtcacattcattttagttttggcacccagcagaaattactgctgcagcttcaaactgagggctggagaggtgataagtttatcattctgggtaaagagtgtgccaggaattgcatctgcaaagaatgctgttggctgctcctgtgtttaacccatgaacatcagtttgtttaaagctggcaggcaagatttgctagctagctaaataaataaataaataaaattaacattaaaaagtaagaaggtagagagaaggtgtagggtgatgatggcgaatattatattataaaagaaatgaagagaaagttaagaatagatgaacaggaaaataatcttagattttcaggttgggtttttttcttgattggtggaaaatataggtgctctattcatagacacatgtgcacaggcacacacagatgtatatgtacttatgtatgtgcatttctttcttgctgatattttcttgaaaacataggttgtcatttctaccttccagcattttcttcacctgtaacttgtctctttcaacagtgtttattatgaatgtttgcaacacttcaggtgctgttccagaatactagacaaacactggtttgagataaggatagagccataaaaggcaaaaggagactggaaggtagctttaaaaattctctttttaaaattataggaatgtaacagcttgtatttattaacatgtgtttttctctcactctgtgcatacgtcatctaacttagccctctccatcagcttatgaattaagtaccatttccaatccctttgacaatgaaaaaaatgattcagagggaggataagtaacttgtctgtgttttgcagctagaaagtggcagagccagcttgcaatgcaagtctctctgactttaaaatctgatctcccactcgctaagctgtacttcctgagtttgaatttgcctgggctgttttcaatgtaatattcaaataataaaatcataattgggaccatattctttgatgttttcaggtgaaaacatattacaacaaaataacgaaaatacaaaaacactttctaaaccactttttcaagcaatgtatagatgatgacattttaccctagtaaaacaattataaaatagtctattgaatttgtttgaacagatttctactaataaaagtaaggatttttttttgaatttaaaaaagtaaaaaggaaaaatggttgaatcagaagaagggtctattgggtatagatctgaccttctctctcatattgtcatgccatcacttaactttcatctcttgatcttttttatcaatgcaacaacttttattaaaagagaacaaatattttgagatattccctgaaagaactgattgtagagacagaaaggcctttaacagaaagtcttacagacattttttgcttcatgcaatagctggttttatgtagttttccgtttttcttgtattaatttggaagtgcgtcctcatggaaaataggcccaactacaaaactttggcgagattgctcataaaattgtgacagatcctatgatctgtagttcctgaagtctaccagcccattttacacctgcagatgcatatattcctcatacagcagcttcctgttcttaggcagtatcttcagtcctttcgaactgtcttcactcttgggcgttttgtggctcccgagcattgaaagccacttcactacaccagtaactagctattagagtgcatcctcctcattgaaaatggtgccagaggtgactatactctgaagggccactgtctaacaaactgtgaaaggcaatctgaaaatgaattaattttgaagctctaggacctaagcagtgagtgaatacatgttgtacttcttcaatctaatgaactttaagtttctcatattacttgtaataataactattataattgtacttagtttggttataataattcctatcagtgtgtatatgtgcaagcatatatatctttttcataataattagaactaccatattatggtccctcaatagactttaagtagctctaattctagactccagattagcaagggtgtgtttcctatcacctatattgaatctattctgcttaagaacatcactctcaatatgccttcaccttataagtgtaacatacacccatttttttgaagtttaaacaaatgattttttgcttagaattgcccattctagaaaagcagacagtttttctctattatttctattatgaccaaaacatattttctttaataattctttggaagatcacagttacttcttttgtgtattgaggagcacagctttgagattttggagtttcactcctcatagcctgagggcctgtgacaacatatataaatggggataaattcaacctgtcttcactttatttgatctgggaccatttatatttgttaaattagaaatcaaatgaggtataaatgttgtttgccacaaaagaattgtaaatgatttcatttcttgaaaataagagaatgagtatatattttgtttttgtcaaatctcctacactttaccatgaattgtgaaatatattacaaaatggctaaaaaaattattgagggaaatggtggtgttaacctcaaggaaaaaatcattaatgttgatgtatttcattcaattttaaacatataaatttttcttttttgttgaaaacagaaatatggaaggattctatgtgcatttgagtcagaacatttatttaaatttttttctttccttcagatccatttttctaaataaagaatagaagtttttttttttcttttcttttaatttttttttttttctagcaaagacgacccctttggcatattttcttttcaaacgtgaaatgaggtggaaaatcctcatttcacgacaggaaggacaaatattgacacaaagttaatatatgttagaaccctggaagcaacctgaatctacacatgcactcacacacatacacacctgcctccttcctcctcctctgccaccagacagacttcactcactgccttggtttctacgtctgtagcttcctgtctagggaaaggtggacagagcatactgaatgaccagggtattttaggaagttaaagtatacacaaagcaagtgctcataggcacacatgcacacacaaatacaacctgcttaatctaattttccccacttagagaagagcttctggactttatcatgttcttgtccatcgtgtatgcaatagcatatgccaagccaatactcactggtcactcagcatttattaagccctgtccaccctagccttttggaaaggaatgccctggggtggctgggcggctgcccctgacaggctgtgtcacttatctattcacattgattatgaaagtcagctgtggccagatctcgcttttttccttcttctctcagcccctcttacaagcacccctgcctggattttcatgaggaaataatcagattaggcctttcacggtgagttcatatggagttctctttctccagtgtgctactaactgaataaacgtgtttagtggtaaattgtaaatgacattatgattaccaaagccagcatgggtttcatttaaaaatgatcagaattgcagaccacaaaaattgtgactggcagataggccatttggagaagtgggagaaaagaaaagacaaaaacaagggagaaagataatcattactcaaaactaaaccttccccgagtgacagaagcaggaagaaaacaaatccagaggaaggaaaaatggaacgctctatagaagtgatgctgaactgtcactgcaggctcctgccagtagtggctgaggattgagctctgaagtctgtcaccctcttaagtagttaatgtgtattctctgccataattaagaactacacccatttggtggctctggaaccctgcttacgtgtgctttatttttgcctcacgccaaaattaaaataggaggattgattaaaggtgacctaggaaaatgaataagatactgacaaactaccccatctcttagtcattggtaaactctgaaaaaataaaaaatacatatattttttaatttatgaagaccaggatttcaagtctggctacaaaagtggataattaatattacttgttgataatccctaggctattgtctttgctaaatatgtggctatatctttatactcctgggatagtatgataaaatattaaaagggccaaatgaagacataacacagcaaatggactcttgcaaatatgtgatttgacaaatcgtcaaacacttttccatgtgtgcctgtcaataaattgtgcagagagaacttctagttattacagcccctttctcacaggataaatcatcaccctgaaccttaagtctaaacacaggccaaaaggggagttatttagactacatttaactttgccaaagggacaggtagaagtttagaaatatgctttttttcttcttcctcatcttcatcattactactaagtaattatactgagttaaaattgctgtggctcaagttttttctctatgaactatggataattaaacttgctattagaaagttttagggaagggaagtagagaaggaagaaaagaagaattgaagaaggaagaaggaaggaaaggaggaaggaaggaccaccaaccttatgtcttgagggcatctttgtagtgaagtcaaagcttcttctttgccattctaatctctatcctggcctgtcccacttccaagcaccacactcgttagtctgtgggtttcttaacagatatatctgtacctacagctctcctaagcaaccattatgtgatagctgaaatgacaatggtgtgaccaccatcctgccacataagatctccttaagcagtataccagagcatcccattgacaaaaactgtgggaaacccttcaggctcctctgatagtccctaatttttacaccactgttagtataaggatgcaatatgtttttcttaatatcccagctttcctcagtcactacctacatgtctaccactctctatctaccatctctagaatacacatctccttcccaatccattcatgagctcacccaaccttttactccgttcctccaaaagttgttcctggtgctgtgagaaagtttgtacttgggatcagcaaactcttctttatattcaaagaaccttcttttcactcatttacctcaactggaacctagccatcttctaaagattccactctttttaaagcctctttaagccacacactcaatccttaaggtgtctttcatgtttccatgctgctcccatgtcctaaataatatcccttaataaaacccctgcccctccgaggctgacaccatctggctgactacctgcttcatgagtcttattgacataatcagcgtggctcttcactccctgaaggccaaagaaactggatcactgttctcttcttcatcctaactctttcgtgattttcttaaggtggctaactcattcaaaaccttgactgctaagaaaataaacaaagactatgcaaagaaccggcaattgctatttatctgaacttgctatagcaagtgagtcggccaccataacttcaatttggtagagatgcaaaggcacacagaaaagtaggaaagctttatagtggaaaaaagggaaagcttcaggttaatgctttgattaatgctgttggcatggggaagctggacacagtcaaactagaagtggggcatcccatgtggttggttatggatacatattttgctttctctaattggttctaagttggaaactgaggcaaaaattggggaattatcagggaaaacacggaagctgacagttattaatcaagtactggctgtttgaggcttgttgtttcacgggttattatttggtcttctaggactggttactgctgtttgttggtcagagttctattttggtatctggcctagatattgtcagtttatatattatctctcattgttcatatcatcttcaagtcctctctagaagaatgccagacacagagaaggtcttcagtaaatgttagccattgctgttagtatttctatcaggtatgctttttcccccacagtaccttactactcactgacacagtgataacattgaaattgtcatgatcactgaacttcaaaatcatgaacttaagtaccatactttcaaggaataattcaggtctttccaactcaaattgttcaagagccccttccttgtggcattaaactcattgccatgtgcatttttctaatatgcatgagtgccttcccttcatttcccttcttatgcagctgaaatgagctatgctttcttatcatcagttctttgtatataactttaatacctatgactctttgtccttggcatagccaggcatgaacccaaccttgaataaactcagccattctgtttgtccattccatcttactgggtatagccaaagcatgtactcatacattctccacaacacgggcagactaaattttctgtgaagatgataaagattaggtttcaggctcttcacttacatgcgccccttgcaaggctccaaaacaaatctcagctatgtgtttgcatagatctgtgcttttgtaaaattttcaaaattaagatattttaaccagaattaggataattctctctttccactctaaatattccttcatcataagtggtgtggggttgagtgacagtggactagctacagcatttttgaaatctagctaaggggaaactgagttggacatgcatttgatttgggcttagtagggtgtgatttgtatggttcctaatcacttctatataaaattattactagacatctatgtcgacttacccggtgttgcaacacacagaagccagaccctaggtcacactgtgttatgaacataatctaaaacatgaggagaaagtgaaaggtataagagatgtaggattggggtaacagtccaataaaagctactctgtgaacatttattcaagtattacagctcatacatgagaaaacctttctaagagacttcccacatttgacaaaaattctaaacatgaaaatgtccctgtctgacagctttgaagagagcagtggttctcccagcatgcagctggagatctgagaacgggcagactacctcctcaagtgggtccctgacccctgacccccgagcagcctacctgggaggcaccccccagcaggagcagactgacacctcacacgggcgggtaccccaacagacctgcagctgagggtcctgtctgttagaaggaaaactaacaaacagaaaggacatccacaccaaaaactcatctgtacatcaccatcatcaaagaccaaaagtagataaaaccaccaagatggggaaaaaacagagcacagaaactggaaactctaaaaagcagagcgcctctcctcctccaaaggaacgcagttcctcaccagcaatggaacaaagctggacggagaatgactttgacgagctgagagaagaaggcttcagacgatcaaattactccaagctacgggaggaaattcaaaccaaaggcaaagaagttgaaaactttgaaaaaagtttagaagaatgtataactagaataaccaatacagagaagtgcttaaaggagctgatggagctgaaaaccaaggctcgagaactacgtgaagaatgcggaaccctcaggagctgatgcgatcaactggaagacagggtatcagtgatggaagatgaagtgaatgaaatgaagtgagaagggaagtttagagaaaaaagaataaaaagaaacgagcaaagcctccaagaaatatgggactatgtgaaaagaccaaatctacgtctgattggtgtacctgaaaatgacggggagaatggaaccaagttggaaaacactctgcaggatattatccaggagaacttccccaatctagcaaggcaggccaacattcagattcaggaactacagagaatgccacaaagatactcctcgagaagagaaactccaagacacataattgtcagattcaccaaagttgaaatgaaggaaaaaatgttaagggcagccagagagaaaggtctggttacccacaaagggaagcccatcagactaccagcagatctctcggcagaaactctacaagccagaagagagtgggggccaatattcaacattcttaaagaaaagaattttcaacccagaatttcatatccagccaaactaagcttcatcagtgaaggagaaataaaatactttacagacaagcaaatgctgagagattttgttaccaccaggcctgccctaaaagagctcctgaaggaagcaccaaacatggaaaggcacaactggtaccagcctctgcaaaatcatgccaaattgtaaagaccatcgagactaggaagaaactgcatgaactaacgagcaaaataaccagctaacatcataatgacaggatcaaattcacacataacaatattaactttaaatgtaaatggactaaatgctccaattaaaagacacagactggcaaactggataaagagtcaagacccatcagtgtgctgtattcaggaaacccatctcacgtgcagagacacacataggctcaaaataaaaggatggaggaagatctaccaagcaaatggaaaacaaaaaaaggcaggggttgcagtcctagtctctgataaaacagactttaaaccaacaaagatcaaaagagacgaagaaggccattacataatggtaaacggatcaattcaacaagaagagctaactatcctaaatatatatgcacccaatacaggagcacccagattcataaagcaagtcctgagtgacctacacagagacttagactcccacacattaataatgggagactttaacaccccactgtcaacattagacagatcaacgagacagaaagtcaacaaggatacccaggaattgaactcagctctgcaccaagcagacctagtagacatctacagaactctccaccccaaatcaccagaatatacaattttttcagcaccacaccacacctgttccaaaattgaccacatagttggaagtaaagctctcctcagcaaatgtaaaagaacagaaattataacaaactatctctcagaccacagtgcaatcaaactagaactcaggattaagaatctcactcaaaaccgctcaactacatggaaactgaacaacctgctcctgaatgactactgggtacgtaacgaaatgaaggcagaaataaagatgttctttgaaaccaacgagaacaaagacacaacataccagaatctctgggactcattcaaagcagtgtgtagagggaaatttatagcactaaatgcccacaagagaaagcaggaaagatccaaaattgacaccctaacatcacaattaaaagaactagaaaagcaagagcaaacacattcaaaagctagcagaaggcaagaaataactaaaatcagagcagaactgaaggaaatagagacacaaaaaacccttcaaaaaattaatgaatccaggagctggttttttgaaaggatcaacaaaatagatagaccgctagcaagactaataaagaaaaaaagagagaagaatcaaatagaagcaataaaaaatgataaaggggatatcaccaccgatcccacagaaatacaaactaccatcagagaatactacaaacaactctatgcaaataaactagaaaatacagaagaaatggataaattcctcgacacatacactctcccaagactataccaggaagaagttgaatctctgaatagaccaataacaggagctgaaattgtggcaataatcaatagcttaccaaccaaaaagagtccaggaccagatggattcacagccgaattctaccagaggtacaaggaggaactggtaccattccatctgaaactattccaatcaatagaaaaagagggaatcctccctaactcattttatgaggccagcatcatcctgataccaaagctgggcagagacacaactgaaaaagagaactttagaccaatatccttgatgaacattgatgcaaaaatcctcaataaaatactggcaaaacgaatccagcagcacatcaaacagcttatcccccatgatcaagtggacttcatccctgggatgcaaggctggttcaatatatgcaaatcaataaatgtaatccagcatataaacagaacagaagacaaaaaccacatgattatctcaatagatgcagaaaaggcctttgacaaaattcaacaacacttcatgctaaaaactctcaataaattaggtattgatgggacgtatctcaaaataataagagctatctatgaaaaacccacagccaatatcatactgaatgggcaaaaattggaagcattccctttgaaaactggcacaagacagggatgccctctctcaccactcctattcaacatagtgttggaagttctggccagggcaatcaggcaggagaaggaaataaagggtattcaattaggaaaagaggaagtcaaattgtccctgtttgcagacgacatgattgtatatctagaaaaccccattgtcttagcccaaaatctccttaagctgataagcaaattcagcaaagtctcaggatacaaaatcagtgtacaaaaatcacaagcattcttatacaccaacaacagacaaacagagaaacaaatcatgagtgaactcccattcacaattgcttcaaagagaataaaatacctaggaatccaacttacaaggatgtgaaggacctcttcaaggagaactacaaaccactgctcaatgaaataaaagaggatacaaacaaatggaagaacattccatgctcatgggtaggaagaatcaatatcgtgaaaatggccatactgcacaaggtaatttacagattcagtgccatcctcatcaagctaccaatgactttcttcacagaattggaaaaaactactttaaagttcatatggaaccaaaaaagagcctgcatcaccaagtcaatcctaagccaaaagaacaaagctggaggcatcacgcgacctgacttcaaactatactacaaggctacagtaaccaaaacagcatggtactgctaccaaaacagagatatagatcaatggaacagaacagagccctcagaaataacgccgcgtatctacaactatctgatctttgacaaacctgagaaaaacaagcaatggggaaaggattccctatttaataaatggtgctgggaaaactggctagccatatgtagaaagctgaaactggatcccttccttacaccttatacaaaaatcaattcaagatggattaaagacttaaacattagacctaaaaccataaaaaccctagaagaaaacctaggcattaccattcaggacataggcatgggcaaggacttcatgtctaaaacaccaaaagcaatggcaacaaaaggcaaaatggacaaatgggatctaattaaactaaagagcttctgcacagcaaaagaaactaccatcagagtgaacaggcaacctacaaaatgggagaaaattttcacaacctactcatctgacaaagggctaatatccagaatctacaatgaactcaaacaaatttacaagaaaaaaacaaacaaccccattaaaaagtgggcaaaggacatgaacagacacttctcaaaagaagacatttatgcagccaaaaaacacatgaaaaaatgctcaccatcactggccattagagaaatgcaaatcaaaaccacaatgagataccatctcacaccagttagaatggcaatcattaaaaagtcaggaaacaacaggtgctggagaggatgtcgagaaataggaacacttttacactgttggtggcactgtaaactagttcaaccattgtggaagtcagtgtggcgattcctcagggatctagaactagaaataccatttgacccagccatcccattactgggtatatacccaaatgactataaatcatgctgctataaagacacatgcacacgtatgtttattgcggcattattcacaatagcaaagacttggaaccaacccaaatgtccaacaatgatagactggattaagaaaatgtggcacgtatacaccatggaatactatggagccataaaatgtgatgagttcatgtcctttgtagggacatggatgaaattggaaatcatcattctcagtaaactatcgcaagaacaaaaaaccaaacactgcatattctcactcataggtgggaattgaacaatgagaacacatggacacaggaagaggaacatcgcactctggggactgttgtggggtggggggaggggggagggatagcattgggagatatacctaatgctagatgacgagttagtgggtgcagcgcaccagcatggcacatgtatacatatgtaacctgcacattgtgcacatgtaccctaaaacttaaagtattataataaatttaaaaaaaaattataaacatttgcacataccaataatgagttgcgaagctgaaacaaattcttctaaactaccaatgaaattatggaaaacaaacgtcaatcatccaagctatagaaaatactaaattatctttctgtcttctctataaaaaatattacaacattgttgttatatgaagaagcaatacaacagttacaataaaatataggaaggatgatacagaggtaagctgggtagtatatgtattacctttccctagattttatcatgtttgtggtacttacgaggtttttaaaacataattgtgttgtgatttttttctcattttaaataattcattcccactccaaattttgaattgatatctttgtacctacttttatggaatggttccctcacattgtataagcactaaagtaacagaaagactgagtttgcacctctttcacaatgactgttttataccatcttctcagtccacaaacatttgacccaactttcctgcccctcatcttagcccccaatactcaccgtcatacttgacttcctgttgataaccgtgcttgcctcacacctcccagcagatagagtgccttcaatctcccacccacctccacctgtgcttacactctctgccctccttcctgcttcaagggagatgaagtctttcaacctatccaatcccatcttatttaagaaggctgtggaccctgttcttccttagcctctcagagagcttactgtgtcagtcatccactccctccaacattagcctctcactttttatgagttctgtcttatctacagcacttcagcttgcatctaaacacaacaatctacctttttgaaatgtacattttaagagactctgaattattacatctatgcattagctgcttctcacaatttcattgtgagtgttagactggtttattccaataacattaaagataaaagaacctacttttcagctcatgtagggcatttcatttgtacagaatccttattgtcaaaactctaaggtaaaaattcttgctgaaataggcttgtattatcagagatgactaattgtttggtgggattatttaatttgtggggtttttcgggtctgttttaactttctttataaaaggaaaattttctacttatccacaataatatatctgatatacaaatcatttttcccctcagtggctaaagctacttgtatatagcttcatctctataaagagtttggggcagtcacatcccaatcatcattctcatatttctaacaaagaaacctcagctctgacttctgagaaacattgggctagaaaaagtatatctgtcacaagactacatagccttgaaatataactaatttgttatttattacagattttttttgtacggtatttttcctagggtagaaaaaattgtaaagagtatattctggagaaaagatatcttgttcgttgtatgttttgtcaagaagatctgaaccaaagaagtaatttaaatattctttattcttatcttgaatcaaaatgagtatatttttcatttttggggagtgtagaaaggaaagaatgatgagaatattttataataactaatatttgatgaaactctttatttaaataagaagatactaattattaactttctgaaggtcataggggtaaatctccaaccagatatgagaaatcaaaatccatgtggtcctttcacagcaaggtattcatacacagaggtttaaaacataaaaatgggagaaaataggaataaaaataatgcgtgtaattggcactgcactagttcctttgcaatcaggaaggtaattggctaagtttaaacaagcaaataactaacacatagttgagaagcctggcatttgatctctagttttaacacagtgcttaataataacaatatggcaactagagagaggagccatagtaacaaaatcttactgcatgcacaaggaatccaaataaatgtttatccaattccttaccacaatctagggtttgtaattaaattcatacaaaatgccaatgggtcataaagatttgtgaattttcattctctgtcatcttattcctgagtttcctcatggaccggtcctgggctaaactctccagggtgtgcaagggctctgcatcacacactttcagcagagattgtgccctctcgggctccaaccctgcacgattcaaacccttttctccctctgtctccttctctccctctcaagtgcctgccttctacctaggtagtttgtcatattctttttcatccagtgtcatgactgaatagtggaatggggaactttggatccttgaggcagaaatggcttgggtgaccagcctttatgacagactggcttctgggtggaatatgtaaaaataaataaataagtaataatgggcctctttgaaggtatacatcctactagtataactcctgtaccttattactccaaaaaaatgttaattacattttaaaaggccattttttattattttggccttggaagttacctgtcataaggaatggaggtatgaaagaaaaacttattttccacccatgtgtatttatttaatgaataaatgaattgttcccaaaatgctttattacaacagaacctgttgtggacaaatcaactatgagatacaatagcagaagaaaatttataaaagtatagtcagccataatttcaatcttatggatacatgtgaaatagatgtattacagtattgcctaacatatattaagaatcaatttagaggatgatacaataaatttttgtgatatactcaattattattgttatgctgagttgacttaaaatatatttgtactatagagtaagagtcttataattagacacctgacaagaacacataaagtgatttgaagaataggaattttgaaaaggacattacatatcaatcagctaataaatattaaaagcatctactgtgcttgaggtagaatgttgacccttgtggtgatttagagatgaaatattgtccctgacctgaagagataacccttaagaacactgatgcctactaacgtcatgtgatttatcaaattacatacagttagatggtagcagagaatgattgagaatcatcaacaaaggaagtgattgtttttgtttaattatttatttataattataacagaactgtacatctttagaggtcactttaagacattatatctcttagatgagaagtaggaagaacaaagccagagatttataaaattggatggaatgtgagtgattaatcaataacatcagcatggctgaaaaaaatgtgtaaaaaggagagtgagctgccaagtttagaaaaggggaacctctgtgatttgaggatttcccatgaggaaatgttacctaactatcttatttggaaaagatataactgtagtagagattggtgcatcaggatctcaaaacaaaatttctagggccattaagaccatgtaattaatttgccttcatactggatccatgcttctgaagacaactcttaacattagagttagcctatgatataatcacagggaaaaaaacacaatgtgaaggttaaaaaaaggagactattcctttaaatttgataattaaatttttatttaatttttagcattcaatgcaatgaatccaatttcattaagagacatagaacagttcaaaatttctgttttatcttgtgtcaattttaaagaaatttgtctactttaagttgttgaatgtgttggcaaatgtttgtttgtaatagtttctcttttttttctgcagaatctgtaatgataatcctttcattcttaaaattggtgatttgtattctctttattttgatcggtctagggaagagttagtcaattttgttgctgttttccaagaatcgctttctctattgttttattttgttttgttgttgtttcttttctacttcattgatttctgcaatcatattgattatttcctttctttgacttttctgtgatctttttctaaattccttaaaaaatttttgacgtgcagttctgttatttttttccagcttttatgaggcataattgacaaataaaaattttaaatatttaggatatactatataatgtgatgttttgatacacatatacattgcgaaaactaatatatccattacctcattattacctttttacttgtatgtgtgtgtgcgtgtgtgtgtggtgagaatatgttaagatctacccccttagcaaattttaattatatcatacagtattattaactgcaatcaccatgctgtccattgtatcttttttcaaaattcttaaggtagtaccatataggacattgcttttagataattcttctttgcttatatgagcatttaacactataaattttcccataaaagtactgttttaacttcattccccaaattttaatatagtaaaagtataattattattgttttaaatattttatagttttccttgtgacttttaatcatccctgtttttgctgttattgttgaagaaaaagtaaaacatgtgccctacttctgaaccaacaatttggtagttaaatttattaacaccatggtcaggtttagcatagatttataattatatcatatggatggaagaatataggaaagactagattatatgcaaatctagtatttcctacattaaagataatttgattttttgttccatttcttaagctacttttatgaacttacactaaggcaaattttaaaaatctagaaaacaatacagaatgatttcgtgaatataaattttaaatcaaagaaattctttattgaaagataaaatatccctatggattcaaaacaagaactattctgggttcatataggaggtattaggaatggtagaaataatgaataacgctgttcctttaaatgttttattaaccctcaccatcctcaacttggactctttaatatcaacaacttccgaagttactactttcttctttccttcttcttgtatttctttactttttatgtttagggaaaaatagagtatgagaaaattatatagtttgacatccaaactctttcacaatctggtcagacacacctcttcaattttaatatgccttcataatttctctgttccacccattcccctccatctacctcttctcccattcgcttggatgttactaccccttctcttataccctatttctattatggagctatgatattgtgagattctttctatatctatatctatctaaatctgtatctatatctatatatctatatctatatctaatctatatctgtatctatatttctggttcctgaggcagagctactaaaatcagtagtgctaggagactcttttgttcgaatatttgatctttgactctggttgctgacacagaagccctaagatatttgtaattccctaagtgacagaaacattggatacacagttcctaaatcccttggaatttcctgggtgataggaatatcttttttttctaatgagctaatgcctcaactactggatagcctcaggatggaggctggttgccaggggaaccaatcacgtgactagagggttggaacatcaagcctcatctcctcaccatccccatttcaggggaagggagagagtctgaaggttgagtcgatcaccaacaaccaataacttagtcaatcatacctacataatggagcctccatgaaaggctgaaaggacaggattgggagagctttcaggtggctgaacgcatggaagtgtcttgagggtggcacatgcagagggcatggaagctccatgcccttcccacatgccttgtcctatgcgtctcttccatctgtctgttcatctgcgtcttttgtaatatcctttataataaatgaaaaaacataagtaaatgtttccctgagttttgtaagcctctctagcgagttaattgaattcaaggatggagtcctgagagccctgatttatatagccagttgttcagaagcagaggtcacagcctaggacttgcaattggcatctgaaataggggcatgcttgtaagactgagcccttaccttgtggagtctgcactaactttgtttagtatcagaatttggttaaattatgtgacacccagtttgtatccactggagaattggttgctggtgtggtgaaatacctacacattttggtgaccagaggtgaggtattttgtgttatatggagtgtgtgagagtagtaaaaagcagtttatcttgcttttctctcaagggcccttaatgattatttcattgtcttgattcttttacttcttcaactccttttctcagttattatctccattattaactttaaataacatattatgtaacatatacttttaaaatatattaaagaactattatttaatttttaaaaatattttgccgcaatcttccttgcactctcagtatctggcacaattagatgtttaataaatattttatccagttatagatgatggcaagagtgatggattacaaataatcattgacagattataattcatatatcacttgttttgcttcttttcttttataggtacatttagagaagaacagaaatgtacataccaatttctgatgcaaggattcatctgcaaacagactgaccaagtggtcctaattcttgatagcgctgatgccatttgggcaattcagaagttatatccagttgtatctgtgactagtggttttgttgatgtctttagcagtgtaaatgccaatattccctgctctacttctgggtcagtgtctactttctattctatcttacccatcaggcaaatcaccaaagtctgcttcatggatcaaactcctcaagttttgcgcttttttctattggggaacaaaagtacctccaagcttctcttggctgtattctaccatgagctccagagcccccacgtcttcttaggggaaagttttattccacccactctggttcagtcagcttccttattgctgaatgaatctattggtgccaactatttcaacatcatggataacctcttgtatgttgtcctacaaggagaggagcccattgaaatacgctcaggtgtttccattcacttggccctcactgtgatggtttcagtcttagaaaaaggctgggaaatagtaatactcgaaagactaactaacttcttacagattggccaaaaccaaatcaggtttattcacgagatgcctggccatgaagagaccttaaaggccattgctgacagtagagcaaaaagaaagcgcaattgccctactgtgacttgcactagtcattatagaagagttggtcaacgtaggcctctcatgatggaaatgaactcacatagggcttcacccccaatgactgtggaaactatctcaaaagtgattgtcattgaaattggtgattcgccaacagtaaggagcactggaatgatttcatccttatcaagtaacaaattacagaatttggctcatcgagtcatcactgctcaacagactggggtactagagaatgttctgaatatgactatcggggccttactagttactcagtcaaagggagtcattggctatgggtaagtactaattatattcacatccaaatgagggctgattttttaggtccatattgacatatgttgcaaatgtcaatctacttacactgaatcatataactcatctgctttttaagataagaataaaaattcaaagagtcatttaaagacttaaattcttagtttttagattctatattaaattcatgtttttcatgattattctatttccaaggtggtagaaaacattatattttgattccttaaggtgaaaagcatgtaggaagagatatttttgaagcaacttgtttttagttcatttgattgtttatttatttatttaatgaatttaagcaatgggctaggttctagggttggtaaagtgaaatagatgttattctgttgctactgctatatcattttatttgtgatagtgctaataagctattagtatttaatgggtagtgactacttctatacaaccatctccagtgaatgtggaatttggtagaacttaaataaaaagcaaaactaaaaagaaaaccacgtcctcacacttggagaaatattcagctaatacattgattgtctttttgtacacagagcaacatatccaagtgaaagtttagctagtgtttttgtgtttataatagagatggatgttcctctttcctgttatacattgatatataaagaggatgagaaaaaatgcaagcaaatttttctggatctggttgatttaaggcctttgggaattgttaacttaaaattaaaaggtactcatagcttattattattcaaaatttattcagttttggatatttttgtcaactaccaaaccttcaccatgttagtgacattattataatattgtgtatggtggtatgagaattagaatgcttaaagaaatgatgctgatgcatcttagcttacattgaaatatctttccttttgcccaattttatttagatcccactgagttcttgtaagtatattataagtatacatacatgaataatttttgtctagagagaaagagagtcagtttattgcttaattttatttagattttacagtactgagctttctaataggtcgtaattccaaaatgactgattttatattatatataaaagacgactcagttaatattgtgcttttaactagaaacagagaaaagtcaatgagtagaagcaatagaggtacatcagaagaaaaccagcagagagtggatccagcacaagtttagatatatacacacatatatgtggggcatgccattctatcatgaggaagtgaaacagcttcagagaaaagatcacttttatttatcacccaccatttgtcatagccatcatgtttttttacttttgactcagttatttctgatttaataagaaacagttcaaagtgtataatatagcattgattttgtgttggaatgtgttctatccgcctatctctctctctttttctttagcattttaaaagacattttctagacataaggcaaagagtaaatcttctgaagataaagaagggctgcttcttaagtatgtctgaacaaatttctcccgaataagaaatgccatatcctatggcattcaatgagaattagcaaggtttctcatgttttctagtgttgcacagtatgataaaaaaccaaaccaaaatgaaacaaaaccctaaagcccgacacagtctccagagccagccttgtttctttcagctttgatcacagtcagttgggtcttccattgaactcactggagagccattgacgagcccatgaactgaccttaagccagcagaaatgagtctaggaatgcagttctttcttttttttttttttattattattatactttaagttttttcatggaaaagtaccaaggatgttctccagtggtttgctctcgttaatttaatgagcttatatgcatttcaacaaattcaggccatactggacacatttttctaagagagtactagctactttcaaaagctaccaactttgggccaggcgtgatggctcacacctgtaatctcagcactttgggaggtggaggtaggtggatagcttgagcgcaggagtttgagaccagcctaggcaacatggtgaaaccccgtctctacaaaaacacaaaaattagctggatgtgatggtgcatgcctgtagtcccagctacttggaaggctgaggtggattgttttagcctgggagagagaggttgcaatgagctgagattatgccactacacaccagcctgggtgacagagccagatactgtcttaaaaaaaaaaaaaaagaaagaaaagctataagctaccaactctgttttgtgggaagaaacggagtagccatctacttttaaagtaaataatacacagtgaactagcctcttctggtctttctctagaggcatctggattcaagcatcctctgcttagctaagtttccatcaccatgttttccaacttccaaaactttgttgatctctgttgtcatttgttgtcttcttgcatgtggcatggtggtttgctgcacctatcaacctgccatctaggttttcagccccacatgcgttaggtatttgtcctaatgctctcccttcccttgctccccacccgtcaacaggccccggtgtgtgatgttcccctcactgtgtccatgtattgtcattattcaactcccacttatgagtgagaacatgcggtgtttggttttctgttcctgtgttagtttgctgagaatgatggcttccagctttgtccttgtctctgcaaagggcatgaactgattcttttttatgactgcatagcattccatggtgtatatgtgccacatttctttatccagtctatcattgatgggcatttgggttggttccaagtctttgctattgtgaatagtgctgcaataaacatatgtgtgcatgtgtctttatagtagaatgatttataaataatcctttgggtatatccccagtagtgggattgctgagtcaaatggtatttcttgttctagatccttgaggaatcgccacactctcttccacaatggttgaactaatttacactcccaccaacagtgtaaaagtgttcctatttctccacaggctcaccagcatctgttatttcctgactttttaataattgcctttctgactggcatgagatagtatctcattgtggtttttcagggacctcaattctgtagtcataggaaatgcattcttccaacaacctgtttggaagtgaactcttcagtaaacccagccaagcctgtctggactcctggcccactccctggagataacacatttgtgttactgtaagccactgactgtggtaatttgttatacagcaatagaaagtaatatggcatatcacataaagctctttgtttgtgacattgccatgaattttgggccatgaaaacagttactgtgagggtgagcatgacactgtgggagtgtgtgtctgggtgtgtgcaatgtgtatatacttatcatattagtagctttttaagttcccccattctgcataaggagcaccctatcaggttgctttggaatagagaagaaaaccaggaaagccaatcaattatacaagtcttttggcattcagtcacctttagcattttctcttctgcatcttctcctctttatgtatcctgggcacctgctttctagaagagagctgtttggagcatgaaagagtagaatctttctatcagcaaggaagtatgttcttttccagaccggcagaatgttcatcctagaagagattcctatattgccagcttgtctcttttcttccctatgacaaaaatcacaactttgccattaaagagtgtttttacatcatttcttcttttcactacagtacaaattcactactttgtttaattgggtcgatggcaaaattattgtaatcttatttcatatgtgtggctttgtgggaaagtgagatgttctacgtaagcaagctttccatacaattaaaaattgttccattaataacaagcattttaaaaagtcttcaactcttaatcgttaaaaaaagacaaagattgcataatacccaggcttattcaatgggaaataatgtagactgttcacatttgttatgacgattcatggtcatcattaaatctgtcatttacttcacaatcctgtttttgctgtgatgcccttgggtactatttttcgtatactgaatggtgccagaccactaaatctttagttcttgtcctgcggtttgtattttttctgctattttgctgtgaaaaggatgctaattgtaatctattgtatttttttttttgctattttgctatgaaaaggatgctaattgtaatctattgttgctgttgacatatccacatccagaaaagttctaagtccaaaatcagacgacactaacttaaaatcaattaatttaagaattatttgtacacatagtgaactcataggtaaatataatagactcttgaaagcttacatgccaatgttttttattccccagtgttaaccgaacagctattatgttcaaaatatcatatggtccctataagaatctagagatttgaaaattaatggatatgaaaaacaacatttattcaactatttaatgagaagatgttatactaaatctcattccgtatctattacaaataaatcattaattctctatgaagctgcttagccattaatccagttttttgtaacattaacttgagtataaaatgttaatctttataaaatttattaggtggtcaaggtttcgacttatgattatattctcaagtgtgcctaagcacattgtaaatcacaataaattatcattcaatatatcacatacagtgaaaggtagcctgttttacttttctactattctaaaactcctgtgcaaccaatatcttgaattaaatctcttccattagaaagaccttgagtgatttctgttttcctgtacagacttatgactgctacagctccccaggctaaacaggaaaatttgattattttgcgtatggtctttaaaaatgcagagttttcattctcctagataaaatactcatgctagatttattataaaatcttgttttaaatgatttaccaattaaaatacttaggtttttgtcccctgatttttgcttataattgattttacttatctttcattgtccttgtgccctgttaaacccacctaggcttacttaacagctagtcaactcctaagaggtgtagttgtcccctgaattgttggaagatgtaccgtgtttattctgtgtctttatatacttctgatccactgcaagttatacctaaggttactggaatctcatttttaaatgaataattccatggaatcacaagagtttaatcagaagtatcacagaatagaagtaagcacactgcttgaggagtgccccagaatgtgaagttgaaggcaaagatgagtggtagtttttcagaggcaattagtgacctaagaacagaggggatgcatagtaggtactgatttggcaagtgttactataacaacatgtactgggtgcttacaacatgccaggcttggaactactagaccacagtgccagaaaaaaaccgtcagatcataagacatttcttccctcttaggaattggctatttgctaagaaagcctagataggcttaaaagggagcatcaggaccatgaaaggtaagaaaattgtatctatcaactcagaaggataaccagaaaagtcattcttgtcatacaaagtatacagaaggttattcttgagggggagagatcacagtgttctatatctttgcatatctcacagtgccttgaacaacatttgtacatagtagaagggttaacatatacttgttaactatatagaaatatgttgatattagatttgcattttccctgtatataaacataatatatttaatttagaattctttagaattgactaaagaatttacttttttctttcagagtacaaaattgtccaaaatcattttatatttcaagtccccttgtggcacatatagaatatttggccttatctagcctatttaaaacaagagagataggccgggcgcggtggctcacgcctgtaatcccagcactttgggaggccgaggcgggcggatcacgaggtcaggagatcgagaccatcccggctaaaacggtgaaaccccgtctctactaaaaatacaaaaaattagccgggcgtagtggcgggcgcctgtagtcccagctacttgggaggctgaggcaggagaatggcgtgaacccgggaggcggagcttgcagtgagccgagatcccgccactgcactccagcctgggcgacagagcgagactccgtctcaaaaaaaaaaaaaaaaaaaaaaaaaaaaaaaaaacaagagagataaaaaatgctcaggacatcatgaagcattcaatcaaaacatgaggctttttataggaactcggcttagtagctttgagaagaaggttgaagagagagtatctctgatttccaccccaacttcacctcaccccaccacagtaggtcttgttgagagccagttttcactaataaaacttacttgctttctgagttttccatgcaaatagaaataattccatcttctacagggtaaacatttcagatctggtggaatcgaaaagcaagaataatgacatgaataggagtgatctcttaattgggaaatttctgtattttcttgacttttctcctatagcctgcatttaagcattgcagaaaaaaaaatctctcacatacctaactgggtattggaagctattaaataatggtaaaaactgggatgaatggagggaacttttctcccccattttttaaagtttggctgtaggtccttctgcctgcaggctacagtcacattagcagttggaaattggataacgacagcacaatgacaaatccaggttgcttgcaataagttgctaatccctttgctttaatattggagcagcatgtaatgatgtttggacatcactccagtttactgacgaccccactggggccagcaatagaaccttacaactgtctaacaaggcatcaggtgactcccgtcgtcacagcaacggacactggaatctaatcttccctccatcccttctagcacccaataacgcctagattatataagtggcccatcattgcttggtaacttgaatcaattaacgttaattcgcacaatgctatgatgtattgtgatcactttcatttcagggaagggggagaaattgctataagtcacctaaaatgaggttgtctgtggtgctgaggtattaattgggtgtccatattaaatgcaaaaggagcccatcatgaaaggaaagtggatgagtgactctcttggctgctattgacctatcagaagaagacagtgcccttttcctttgcttttatctattacagttttccctattgcgtgtcaagttgatgtattataaaaaattcatttgatgacctttcacccccttagcagattaaacaatttcacttcgatggcatcattaacaggaccctgcatttaatgatgatttctctaaaaggccacggagattcgattttaagctaacagatttattgcactattataacatatcgtaaaaaacagtaccacctacggtcaggttttaggatagaaactgcttaagagtttatgtggagcttaaagtggtattaccttgggatatgctgcagcagcaagtctgtgacctccagtgagatgctgtttacatttaacaagagatgtttgctcacaataaactttaaagtgtgtcaggaatggaccttttagcgggtgttcaggcagttggtttccctctcttcgtctcaagacgtcaatgtacttatgtgagaatctttgatggggtctttcagtctctttaacccagactgcttgcctgcatcctagcccctatcagaaagaatttaaggaaaaggttaggggagaaataggatctgataacaacattagaattttctaataacctggaacccacagaaggatagaattaatagcatggatttaaaaaatctggtttaaattgttccctttaaaaaaggaaagaagccctagccactcaggctaaacaaactaagaaatgatgatggggctagtgtgagttgaattcccagggagtgattccagccaaaaagccagggtcttagctggtagatgactaaagagcttcttaggaccacatgtttgcactctgcccgcatttcctaggattcccaggggagaagaaaattgcttcctatggaaacttcatatttagtgatccattgtatttgctcttccactatttcctctttcagaacaaatcttcactttttcctgacatgcaccctccatattaaataaatactttatcctttcctcctcacgtggggaaggggaggtggttaggaaatagaatagttgacttacatttaatgggagaaagcaaagtaggctactttaaaaataaataaataaataaatacctcatgagacctggcctaggctattgaggataactcaccaagggttgctctatgtcagggtcccatatatatgtgatgtccaggtgtctgcatttagttgccaaacatctgttgcatgcctatgatatgtaattcacaataggcttaatgggacaataggtatataattttattttaatgaagcaggctctgtcatcaaaaataccgaaactctgagtgaaatatgttttacactgtcatgaattatgtaactattttctatgtattccattttgttgctaagtcatgtcagcacttaacatgttcaaaggaactaagaagtaatataggtcattggttaaccactctagatcttggtcaacacttactatttgtaggacctttggcaagttatttaagcctttttggacctcagtttcttcatatataaataagagtacctaccacatagtgtcattttaaagatgcaatgaatttatatatgaacactttatcatggaacttggtatatagtatgtgctcagtaaatatcaattctaaatattattctcctcagatgcttcatgcaactgaagtaaattaattcattaatgctattaatagttattgaatccatttagtacaaacacactcggaaaatataaatatggcttgttgtgaagattaaatgagctattctgtgtaaacagtggtgtactggagtttgctgttgggcatctcttcccagctctgctcagtgatattatcttgtcatctcagaattagctatgttggtggtatttatatcacagaattggaacacatccacaaatcagggcattatttgggaagctgatttaatagcttactattggacgtgtccatgtcctgtcattttagtctgaggcttttattattattatctatattagtctgaggctaattttcactgaggcttttattttttggctgattttaataaatgatgataaaaatatatgctcataatttgtgattttccctaccccctagtccattttcattatagctaagaaaacatatcaaatacatacacaattaacctttgctataaagccatgttcactacacaatgtattattttctagaaacacaggcaaatgcaaatattttcactggtaataatggattgtggaaaattgctaccatagggatatgtgtaatcctaaggatgtattttgtttgtttttatatctgtcagaaatacaagcagttttaaaactgggaacttgatatatattcggccctatgcactttccatcctagtccagccttcagatggagaagtgggaaatgagcttccagtgcagccacaattggtatttttggatgagcaggtaacttttcacaggtaacaaatctgtctttagagctaagtagcatgtagcattcagcctatcttttagagtgtgtcatcattgatacacatttacagagtgcccactgggtgcaatttgttgcacttagagcttctcactactttcacattttccttccacttcacagcctgcctgccttctattttctctgaacattcagaatttgatcaagggtaaaaataaaattctgatacttttcctccccaaccaaattcttgaagtagatctgtcacatcttctctgaaatctagccttcacaaagaagtagatctatatctgaagaagtttttcacatgctagtgaaggaacttatgacattatagatacattacagttttacgttttttaaaataatctctcttatatgtgattaagtaaaacaagaagtttctgtgcttaattctaatttcagtctttgtgtcctgattctattttatcttttcagtatttacaaaattcacagtgaactatgattgttgaattggctttctcctgtttataaatgcatcccctgacatgtttgcagagagaaatctgtggcactgaggtccacacttgaaaacctgtcaactttgatgtggtctggcactcacccagctctctcctgttttcttctctttacctttcctttcttaagaaccttcagcacatagtaccattcttttctataaacatagttttcctttcctctcctcactgtcctgccccaacttgtcttgcaataatttcctcactcttcttacaataagttaattctgatatattcttaacatgagaaagacatttatttatcactttctttcctttatttctactgaatatatgctttataaaagcaaatatctgatccatcttttctaacttcacaaaattctcttctgaatccaactttttcttcctccctcctcctattcccatttctagaatcgaagagtagagtccctgggacctccttcagagccatggacaatttcagcttccctggaaggagcatcagactcagtgctaaaaggtaggtaaagtatctgtaaatttcagatatctgttaccactttatctgcacagaaaatgtttgcagccattaggaattcatagcaaaattggtaatactgaatttcttcagtaatttgggaagaaactccttcatccctaatctacagtgtcagtgtctgtgaaaaggaagattaggctggcagcaaatcctaaagtcaccactttttctctcccttccctttcacaataaagcaacctttccaacttatccgtatccttaaggtagtgtaaggaaaagtgcctggcatctttgggtgagcatcaaatcctaggttttctacagtccactcagtgcccccacgacacacccttgtttggtatagtatcatggactgggccagggagcaatttaccaagtacaatatgatttctatggggaaatagaaagacttgctctcagtggtatgaagaataaatgtgatgataagtgcaaaagcacctgacccatagcagcccttagctagtttttctccttatgtttgtctaccctcttttgtcttcctgttctatcccagcaccactgccagctccacttactttccttgaagctcatttatatgaaaatctatttaaaatgcagatttctactaggcccaagatagtttggcaacatattctgcagaaggacccaataatgtgcattttagggcctggtctagagagaagcaagcaggtgtaacatgatttttatgggaaaaatagtttctgagttctaagttcctatttaaccctctcacacacaaaaccgttgaaatacaacctactcaaagagacaaaagagacacatattaatttattacgaaattgttcaatcattgtatttttatgttgtcaaacagtacaatatattatccacagaaaatatgttaaggagaatgtgtttgagaaacagaattaaggcaaaggagcctcataactaagggagatcaagggaagaggaaaagtgagacaggtgctggagccagacagtcaacagaggactctggggaccatggtggggagtttgggctgcgctctcagtgagatgcagagccattggagggttttaagcaggccagttccaaggtctgactcgcatgtttagaggaccactctgctctatggagggtggattggagaatggcaagagtgaacctcctgagccagttggaaagtgattgcaaaaggccaggcaagggatggtggagatcacaactggattgattcagaatgtcttttagaagttgaatcagcagaatctactaggagtaaagaaaacaaggacttaaggacaacttataggttttgatcttgttatattgggtggatattggtgttatttactgaaatggggaagactggattgggagcaaaaagcaagagtttttatgatgagaaacatgaaaaggtaagtacaacctggttgctgggccaaattaagacgtaggcccttttgatttcagttttaaggcagtaagagcaagaggttgtgttttacaattaatatagtttgtgttctgggtgtcacaagagtttttttcttcttacctgcctccctccaacataacccataaattattaatcatgcttcctaccaggagccttctccctattgtgtgcagtcaatctcccaacacacagatcttgcctgacagcctcaaactcttcatgcataggggtttcctctctgcacaaggggcctcacaattatcacagcaccttgaaattcttcctctgcttatgggtaggattgtgtatttccttctcatcggagggagtcccaatcatgcacaatatcacagtccaattctgggcttcaccttgaggtgaagagaaattcattttatgtcaacctgatataacctagaatagaagggttcgatggaacatttaaaaatcatctcctatatttggatagggagctggagattacaacagtctgaaaaagtgaatctgttaaatttctttaatctctcccactagtttcaatgagaaaatttaaaaagtgtcccaagaattcaaatggattaaaaatgatttttaaggtagatggaaaatatcctcagaaaggaaagcattcactcccttccccacaacttctatgtcagacagttttcaaaaatccttgcagggtcccagtaaaagaatagagccaatgggtttatcttgactccttgaattcagaattgttgaataattctgaccaagagctaggactcaagcaaatctctgcactaaatattgtgttgctattttagatgagaaataatttataaattctttgtgatttcaaatgtgacttgaaaataatgttttcaggctgggaacggcggttcgtgcctgtaatccagcactttgggaggctaaggtggctggatcacttgaggtcaggcatttgagaccagcctggccaacatggtgaaacgccgtctctactaaaaatgcaaaaattagccgggcatggtgggcatgcgcctgtaatcccagctacttgggaagcggaggcacgagaatcacttgaacccaggaggcagaggttgcggtgagccaagatggcgccactgcactctagcctgggtgacagagcaagactccgtctcaagaaaaaaagaaaaaagaaaataatgttttcaaaatatgcatactatacaaagagatatatatcagtactggtaaaaattttttaaaaaagaaaataaaggttatttgttttaagcacaattatctattattaccttgatatttgtatattataataggggaataagtaggaaatcttgttaacttttgcaaattcttctttctagaagtgtgatttcaagcactggcttttaatgcagttagtattgtaattataatgaaacattctttgagattagccagtaacatattgaaaggaagtttcataccaataaatcactgaaaattataaattgatatggtgtatatgtacctttttataattggccaaatatctccattcttatgcaaatttgaggatgtgtttaccactctttaaaaattcggtttattggccgggctcagtgacacatgcctgtaatgccagcactttgggaggccaaggcgggcagatcacaaggtcaagagatcaagaccatcctggccaacatggtaaaaccccgtctctactaataatacgaaaattaggtagacatgatggcatgcacctgaagtcccagctactcaggaggctgaggcaggagaattgcttgaacccgggaggtggaggttgcagtgagccaagatcgcccactgcattccagcctggtgacagagtgagactccagctcaaaacaaaacaaaatcagcttatccaatttcctgtgcacctcatgaatcaggtagggcatttctgtgggttttgtgttgtccaaaatgtttttttcaggcttagaaatgactcatgtgccagctcaaacatcagcctacctgcaaaatcactgacttccaagaataggccatgattttacagttatttcttgctctactctggctatgagtctaagctcattcagatggttcccataaaatatatggaatgttcaaatggatagccataagtcaatcatagacgtgcctcgtcttctaattgcgtttattattggcctaaaactgttcctatcatatggtgcacattgcctaccatttctgatgacattgttccttaattttttgttatttgtctcttaagaaacatataaaattgttgtaataaagtctccaagttaatgaataatcatttgatgttgttttcaatgaattaatctcagatctcagtttttttttaatgtcaccatttaatttagcttatacattttgtttctggcaaagctgcacctcatcgattccagaaaatgaaattatccccttctaaaaattctcttaaggaggcgattgacatctcgtgattaaacagttcatagcttcaaaacccttactttttaaagcttgcttcgtcttattgttttattagaacaataaattttcccactctcttttcaatttgactttctactattttgacctgttattttttttaacccatctaattacttattaagacaccaaatgttttccagtgagaacacatggacacagggaacaacacacactggggcctgtcagagattggggggaggactaagggggaaggagagcatcaggatgaatagctaatgcatgtggggcttaatacctaggtgatgagttgataggtgcagccaaccaccacggcgcatgtttgcctacgtaacaaacctgcatgttctgtacatgtatcccggaatttaaaataaaataaaataattaaaacaaacaaaaaacaaaacaaaacgagactctaaatgttttcagcatgtccacaaaaataattttctaccaaactttgaggtcttgctctcctcagtaccctctccacgttctctttatacaatccaaatttaaaggcccaggtaatgtggcatattttgtcagaatctgcccatagactctccagactttcccttctacttacacaatctatcttttgttcaatttgttgaaagtaacacctgtgtgggtaactcatattgttgctcctggtcatttttttttttatttttttaatgtgggcagttcagttagaagcttcttgggtttaaaatcccaaggaatgaggacaaaccagaatggtccttgtacagatttgtagacacaaggcatgtcattaagaaagtaagaaaatgaagtgaatttatccaaggttgcccactgtgaagatgaaagattcagaattgcatttcgaactgcctgttttgatgctgtcattctgttcatttttcagtgccattttgctactgttggtgttttggtatagaaagtgcttaggatatgtaacagtcactcaccttctgatcttaatacagcagcatagaaatattaatttttagcttttttcatgttctggtaatatttaccacagatactctcacatgactactggaactcacctccccattgtctactccatgtgttacccatattctattccttacccatactccaaaccatacccatactcatgccttacattgctcctccagaccttatccatacctaagaccctacttatactccataccctatgtatagtccataccttacttttttttgaggcagagcctggctctgttacccaggctggaatgcagtggcacgatcttgtctcactgcaacctctgcctcccgggttcaagtgattctcctgtcttagcctcctgagtagctgggattacaggtgcccaccaccacacctggctaatttttctatttttagtaaagacggggttttgccgtgttggccaagctggtctcgaaatcctgacctcaggtgatcctcccgtattggcctcccaaagtgtcgggattacaggtgtgagccaccgtgcccagcccatcccttacttatatcccttaccttgccatacttcatacattaccatgtccaataccttactcatattctatgccttagccatattccacaacttacacatactccatgccttattcacactccatactttacccatagtctgtaccttactcatattccatactttacacattctccagacccttactcacacttcatttctaacccatagtccatatcttacttacttatattctgtaccttgccacactttgcacattatttatacccagtaccttacttatgctccatgccttacctattccccataccttctcctatatgataccttactgagactttatattttactttgtcctgacacttattgcacctcatctttcattatttttctttcagtaaccttaaggatgtcatgcccggccagcttagaatcatgttgtggccatgaaaagtgaatgaggcatgaaaccatttactctttatttatttatctatttatttatttattattatactttaagttctgggatacatgtgcagaacatgcaggtttgttacataggtatacatgtgccatggtggtttgctgcacccatcaacccgtcatctacattagttatttctcctaatgctatccctccccttgctccccactccctgacaggccctagtgtgtgatgttcccctccctgtgcccatatgttctcattgttcaactcccacttctcctatgtgagaacatgctatgtttggttttctgttcctgtgttagtttgctgagaatgatggtttccagcttcatccatgtccctgcaaaggacattaactaattcttttttatggctgcatagtattccgtagtgtatatgtgccacattttctttatccagtctatcattgatgggcatttgtgttgattccaagtctttgctattgtgagtgtgctgcaataaacatacatgtgcatgtgtctttatagtagcatgatttataatgctttggatatatacccagtaatgggattgctgggtcaaatggtatttctggttctagatccttgaggaatcaccacactgtcttccacaatggttgaactaatttacactcccaccaacagtgtaaaaggattactatttctccacatatgttgtttcctgactttttaatgattgccattctaactggtgtgagatgagataccatttactcttttattctacggacaccaagccacactcaagccaactagctcacttggatcagtattgtcactattaccttttttaagagatccaatgggaatgtgtgaggactagtttgagggtgtcttatatacacaccttttttatgtgagtgagtcatgaagtagggaagaaatcacatgcagttttctgtttttagcatacccatgtcaccaaactaccctattttatgtgattgaaagtttctcttgaagccatcatgaaatactactttttcacttcagaaagaatgcaccaaaagcatttgggatggattatctaacttactataagtatctcctggagaaaaacaaaataacaacaacaaaaccatatctatatatctcctctaaatcttttgttctgcaatttaacttcatattcttttttctttagtagaccctcctcagtgaaaaggcagttacaacctattatcataaaaagtgaatttatatactcaaggacaattatttacaggtcttcaatatcctttgacatttatggatcatagttgcacaaaaaagtccttaatacttttaaagataacatctcaacattaacaatgtaacagtttgctagtatgcatacctaggagtgagtgggatagctgtggggataatttgggctgcaaaggtattttagaaactatctatcctgcagaaacccattcaggtatcattccctggtagttgtgtaatcaattccaaagttgctcgagcccagcaccccaccccatcccaagtcccccagccagtatactgtttataccagcatgatcagggagcctgtcaattgcatttgtatatgtcatcatagctattctgaagatatgatgaaccctggagtaatgtactatacttagcagcaactgcctcagcttttgagcacatatgcttcaaatctgagaatatcatagatatatatgggaatctttgtagagatctctaaggcaagctggtatttaacgcaaaagcaaacccatttagaactaaagcactttccattaggcaatttggcggctgttctacgaggccaactcactgtgctctacggacacatttcgattaaatgctgctttgtattcttccaaagatgggaacaataaagacgtttgtcaaaggaaaaactgcagcaaatgatttcatgttgaacatctgtactcttcagttcattgtttgcaagagtttattgaccataattttgatgcatataggttttaaagagtataaactgcatttatcttgggcacctatcatttatttgagtcttggcttatttattttcattttactgggcattttatttattttagaactcagaagagatgaagcaaaagatctttctcaaaaaagaagttttagttagctctgcaaaattgatgaagaaagacagtgttttcacaaaaagattaagcaattgaattgaaaaatgtaacactaagcatattgtatctttatgacacatttcagccttagagatctcaaaccaatctataaactttcagaccactttcataaccctttgtccaccatgccaatcatattgacatttccagagtaaagtctagcagctgttaattaggaaaataatttagggatggtggagtcaaaagacgattaatggtattgtgaatgtgatactgagttaagctgccttttttcacgttataaatggatgacctactgttagaagacgcaagggtttttttttgtttttgtttttgtttttttcattttagttagggaagccaaggctcaggcaattcaagttgctaaatcagagtagctctatcagtcattatttggtagattgccatggtcctgatctcttggcctaattctggtaccacataaactatagataacttggatagaagaaagacagactgtagaaactgaccacctagaaagataatagaatttctttctttatatattatacatttaataataatatagccaatatattgtagtggttaagaatgcagactgaaatcaggtagatttgggctgtaaccccagtaccacataatttaatctttcatgagcctatttcctaattgctagaatatagataatagcgtattttatagggttgttgtgtagtttgtaggcaatcgtgtatatatagaacagtgtctggcatagtggaactttcaatatatgttaactgttattctgtcttgggtcatttggttctaagtcttgactaagaagaacctgatggattaggtaacctctttgagtttaaaaaattgtcctttattgtccaaatgtctgccttcgcagaagacatgaagacattgttcgagattagataataaacagctaatttttgttttgtacttttttgtagggtgcacccaggcagaaactcaagatggttatgttagcttctacaacttggcagtcttgatctctgggtcaaactggcactttatttttactgtcacttctcctccaggtaattttatacagtgtgcttttattctgtgttttttttttttttttttgagaagataatcctttctcccttatagtgggaatagctactatcatgaataagaggtcatcatagtttagaaaataaattcacttgactgtatcattaagcttgagaagaaagagcacatgtagaaatggaaacctcaggttactcctggtgagcaagaaaccaaatgtacatttccttctcaacattgacgtttacgttcagtgttctacttgtttttttctttaatttacttacctgacatttggttagatattaataggagaatgttaatttataagaaagagagtcataggatgttgaaattttaactttgggtcctgtcctcctcaaccccctgccaaatggggacaatacccatcaacatcctggcacttcagaataaggggtatgtaaattgcatatctgatccagttctttttgacaaaacatgtaaaaaaaacaccctctggcgtattaaatgtgactctcatgaaaatatagtgatcatttgtcaacatgttatttaactcactaatgaggaaatcagaagataagaaaactaattaaaagagcatttgggagatagtgatcgtatagccagggaagaaatgttgaaataagtttgcaatggatacagggcaataaaagcaaaattttgatagtccagtgtttacagatatcatttgcatccttaactatataaaaattgtttcagcatgtcaatcttctacaaataaacatatctgggtcctaataaataaataataaatagtaagtgaaacaaatatatgtttgagagaacttaataaactttcaacgggccttttgaaaatgttccagtatgacactggtaagatctgtaatcataatcatttttcctttaattccaagttttggatttttttttgtttttttgagatggaatctcactctgtcacccaggctggagtgcagtggcacaatctcggctcactgcaacctccacctcccaggttcaagcaattcttctgcctcagcctcctgagtcactgggattacaggcatgcgccaccaagcctggctaatttttgtatttttagtagaaatgaggtttcaccatgttggccaggctggtctcgaatttctgacctcgtgattcgcctgcctcagcctccctaagtgctgggattacaggcatcagtcaccacgcccagcctggattttttttttttttaacaaaaagactatcttctgagatcagataatattattgctccctggctatatgatcattatctcttaaatgctatttaaaccagtttcatgttcttcctggtttcttcattaatgagataaataacctgtcgacaagtgctcattatatgttttcatgagagtcacatttatacttcagaggatgattgcttaaatacttgttaaaagagcaatttacacatactttatgtgtcaaagtgtcctaacataagtacaggttcataacaaacgtgtagtgtccttgaccgtgggattcccaattcccagggattgtgctgtaagcttgagtttttgaatggatatgtcttaaagggtaagacaggcaggaatgcatattttgttccagatttgtctgacatttaaaaggcctttgtcctttaattacctcagtaattaattaagactaaccaaatacgttatcaagtttattttaaggaataggttgtaaaaccaaatgcgaaatgtattgtagacagaaacttcttggtaactcctgtgattttgaactggtcttggtgttcacacttagtagactactgctttattgtagtttctacttacagcctgtaaaaagaactaactgaagaatcatttggaaagttttcccttagtgtttttcactaaattattcctcttaattttcaagatcaagtctgttaggtgagactctttcagaatgagatttataaaagtttaaatttggagagaatagatggaggataaaaagaaaggaaaaatattaaatatctgcacttctgtgaccccttgttgacatcacactgagtaacggtacacgtccagagagtaactccttgtttccaagtacatcaatttgaagtgctagaatgttggggaaagcagcgtatattcacacattttcgccaaacaatgaaatttcttatttctaataggcttcaaaataataggtctgataagcattgttttatgttattgttgtttcttttgttgttttgtgtgtgtgtgtgtgtttgttgttgttgttgttatttttagagagggtctcaatctgtcacccaacacccaggctggagtgcagtggctcaatcatggctcattgcagtctcaacctcccaggctcaagcaatcctcctacctcagcctccaaagtagctgggactacagacgtgtgtgccaccacacccagttggtttattttattttattttttggtagagatgggatcttactatgctgcccaggctggtcttaaacccctgggctcatgctggcattataggcattagtccccgtgcctggtctgttgtttcattcattcatgaatcaagcagagaatttgcaatcatttccactattttccctcatctctccaatattttagagagaaaaacaaattattattcctattttagaaatacagaaaatagatctgcccaagtatttatggaatcctcttaggtctgacatattatcaaatccagctcatttatcacttctcaacttcctgagacactgtcaagagataagggtttctgtaagtttgtagtactgacttcgtagctagcctttccacgttcactatcattaccatggtgtaggctgtggcttttatgaccatttcttggtgccgtggggttctcaggaggccctcaggggctgctgctgagaagagattaatgtaaccaggtatcacccacaaatccgcccccggccccccgcccccccccaccttcaccacaaatacagttagccagagaaactctacctgtggttgccaattccttggttggaatattctccccccagaaagtcacgtggctaactcagctcattcagatttcttctcaaatatctcctcaaagaggactcttttggatcactcagtctataccatccccaatcctccccacacctccagccactgtgtcttataaactcactttagttttctttatgcacttatcactccctggctttatagtatctatgtatttatttgtttgtctactgtccgtgtgctgggtcctccattgagaccaaagttccaaagggacagagattctgcttagtttgacattatatcccaagggtgtagaaaagcctggtgcatcatagctacaaataaatatttgtttatgaataagtgaatatattgagattatttttaagattgcagttttaaaaaatgttctgatgctaagataattgagagccagtggtctccacccttggatttagataatttcgcctggtcaccctgactttagcttctctgtcatttttgtgttctatacaaaaatggactgactatattttatgtggctcatgtcacttctcagtttagaatctccccctaggctgtgcggggtggctcatgcctgtaattctggcactctgggaggctgagactgaaggatcacttgagaccaggagttcaagactagcctggaaaacatagcaataccccatctctacaatacattaacaaaaaattagccaggtatggtggcacatggttgtagtcccaaccacctggcaggctgaagcaggaggatcatatgagccctggtgttcagggctacagtgagctataattgtgccactcattgtactgaagtttgggtgatagagctagaccctgtctctattaacaaaataaaaataaaaaagaatcttttcttctgtgatacttcatgccttcagaatgttctcaagggccttttgcctgatatttaatgcccatccagatttgtctcaaattcttctagcattaagttccagtactttcctgcgtaagtctcctaagtatcaatagctattttctcctctctgtctttgtttatgtatttgcacagccttcagagtcccctcagatacttcctcctccaggatgctttcccgaatcatatcaatggaaaataaacatccaaagcaattgatttgcattattctagtggcatgtgtcacatcctaatttgtttaacaaatgtttgttatgtgtatcttatttactagcttgtaaatatcttaagaatgggaactggtaacttatcaacttgacccagtaaacaattactgagcaatcattgacaaatggataaaagtatgaagaatttagtttttacttctgtaaatcccaagtaaagtctattcccccatctctgtgcctgattgagcttattcagatgcccataaaaagcaattacttgataacaaacaagccaaatatggctcagatacatgatgtatacagaggagattttgttgtagtagctttgggaccaagtcagccagaagtcaagagattgaagatctgactgtgacttccagtaaaattgtcaggttcagcccagtgaaagcacagcaaagaaaaacatggtgtttccttgagtacataaaataaaaactctttttgcctgagttatgtggatgaaagcagaagtttgaagtttgcttgtttgttttgaatgagctgctttaaaaatgctggctgtaactgttcataaacaagttttttttttttaaataaacctgtttgtattgagatatgattgacacatgataagcatatttaaagcataccatttgatacattttgatgaatgcctactcccatgaaagcatcctcattattagaataatgaatatattcatcacccccaaaattaaaggcaagttttcaaacaatttatttttaaaatgaatgtactttaaaattgacatttttgtatgtggttttattacttcaaatacatgtatagatccatgtaaccatccccacagtcaggataaggaccatttcatcaccccaaaaatctgttctcacatacatgtagcctttctccaccattcatcgttggcaaccactgatctgttctttaactctatagttttgtcttttctacagtgttatataaatggaatcctacaaatgtgtaccattcagagatgggcttcccttactcagcataatgccttttatgctcattctagttgttacaggttatcaattgtgtgtttgtttcttttcctttttctttcctttctttcttttttggctgagtagtttttcattgtctagataaactgtagtttgtttatccattcccctgctcaaggacatttgggttgttcctgggttttgcaatgtacagagctgctaaaaacatttatgtatgtgtttttatgcagataggtaactttcttttttagattattttatgactcatttcataaataataatggggtgagaaatttttctgtctccataaatgggaggagtttcagatgaattcttacagagttgaactctctcaacaggatgctatcttgccccatcattcatggccggcagttctatctgccattgttctagtcctagttttccagataacataactctctaagacaatatggtgctgcagcaggagtccctatgcccctgttttgatgtgttatatggcacgtattgagtagatacatacatcagagcaagtaatttcacacattctggagctgagaatatttttattctcattagtgaaacatgagtgaaagaagctgaaattttgcattggtatggaaggttggtctgaaaattaaaagagagaattggaagaattctcaatcaataattgacagaattggaaataactattatgtgttattgttggaatcttgtgattctctagaaatataaatcttggatttataatttatgtatttattaaatttaatgaatatatattgaacacctactatatcccagatactattatgaatgtatttatttttaccatattttaattatattagcatcttattaacatatcattgaaacatcttcttttccccgccacaggagtcaattttacagctcgatccaagccatttgctgtcttgcctgtgactaggaaggagaagtcgaccatcatcctggctgcttccctgtcctctgtggcctcatggctggctctgagctgtctggtgtgctgttggcttaaaagaagcaaaagcagaagtatgtagttttttttttattttggaatgaaaatttctgaaaaaaaagtcatcatacataacatattaatgattctgtttctttccccaaagacaaatttttgtgagcttctctaaaatataaaattacacaaagccaaattgttcaattaatacattagagacaaggattgcctaatcttaagtaataatagcaataataataaaaactcatgttaactaaatactcactatggaacacattctgagcacttcagataaaggaatttatttaatccacacaacaacccaatgaggtgggtgaaaaatattgtaactcacttcaaaaagtgagttaaagaatcaggggaaaccagcactttgggaggcagaggtgggtggatcacctgaggttaggatttcgagaccagcctggccaacatggtgaaaccctgtctctactaaaaatacaaaaattatctgggcatggtggcagatgcctgtaatcccagctactcgggaggctgaggcaggagaattgcttgaacctagatggtggtggaggttgcagtgagccgagattgcgccattgcactccagcctgggtgacaggagtgaaattctgtcacaataaaaaaaaaaaaaaagaaaaaaaaaaagaatccggggaaatgtcatcctctcctcttctcctttaaaaggggagagggcttagtttgtttgtttgtttgtttgttttttagcataggaattaagtaggttcctaaatatttcccagaagtggatgccattttttaattttttaaagctggagacttgtagtcactgagggaaagaagctttgtaaatgaagcttctttctatcttagagtggaggagataggtgagcagatcaggcattggcaaattccttattccacccattcccccaaccctagaccagccaatgagtgaaagaaatacttgtcttactaggaggctctacaaaaccaaagtaaaagcaagagtgaagtttaaaagaggagaaataaagagaggcaaagagaaaaaagtcaaaataaaggtgagaggaagtagcatagtcccactactacaacatttgctgggcttggagctctgagagatgcttgggaaaggaggctccactggatacattttctgtatttgaactgagctacagcctggtatccctgtttctctcttcatcctgttgatcaggactggactaactacaaggcagctccttgtctttctgaagaagaaggggatcttgacctcgttctgccttatgttgctgtgatttgcagttttttgtttttccttcttaaagttctatctacattcagtgtatgtagtgctgtctgcttgtaagtagaattttcataaatttttatctcatgtaatcccgtgaagtaggtgatttgattctcatcttccatttggtatctaaacctagtagccatgcaggggtctctccctaaggtctaacctcacttttaatcctaagctctagagaaggctttttctaactcctaagctctgctatctccacttttgatcccccagctctagacgtgacttcttcctgtgtttacaaatatatctattacttcagtgtcttccttttcctctttcaacctttcaatatctgtggacacattaccttgtatgatatccccatattttctttactgggcacagactcctaactatgttaaacaaacaaaaaagatgtaaagaaattgcaaggaactttatgaaagttttacagtagtcagatctgtataagtgatttgtattttcttccttataccttctgtattttatatttattaagtttctaaaattaactttcatttcttcagaatcagaaaaatatattgttccacaacttactcataaaaaaagattctctggttaagctatatgctctctgtgcctgtcattttcaatttgggtctaaggaccttgttatgctttcaataattgttgagaatctaaacaacttttgtctatgtgggttctatatccattaatatttccaaattagaagtttaaacagaaaattttaaatttattcattaacttattttaaaataatacatgcattgcatgtaaacataacattttaaattaaaaagttgtattttcaaaaaatatgtagtgaaaagagtgtggcattcttacaaacctctttaatatcttccttaataggcagctggaatctcttggcagcttctgcattcgacctattgcaatgtattgtttttgctgaagtatatgaagaaaaccagcctcagtcagatacattgtagaaaagggatgagcattttaatagcctttacagataatagtggacattcttctttcttactgcacccagacttgacaagaagtagttacttaaagtgccatctcaatggcctttttgtactttgttacatgaaaatccaccagtctcatcatatactttgaatggagcttttatccatgcattatgctttggtcattttgaaaatattgtttcacggagtcgtgaagatcttctcaacgttgacatatttcattctactattcaaaaagatcacatttgttaataacatgaatcattaagaattagaaacctgtgaagctcatgtagttgatacaagttttcccaaattccaagtttcccatgaaagcttgaattttatcactgggaacaaacactgtaagttgtttctgttttagaagctcacttcattcatttgagaaaaaataaaatctgccaaatatacaagtatgaataaccataatttctcaatcattatttcaagctctttcaagtaaaaatggtgttccatgaaaaaatagctagttcagctcaaaattcaattgcaaaattgctttttcttgggaaaatcacatatgaattttaaataaaatttaattttctttagtgctttatcaaagatattcttaagtaaaattggcttttgttttttctcttcttcttggttttttgttttgttttgttttactgtgattttatttcagggtatatccttcttgatcatgcctatccaaaaaatgtataccttgtggtttttactagcatttctctaatgattagtgatgatgagcatttttttcacatacttttggccacatgtatgtcttcttttgagaagtgtctgttcacgtcctttgcccattttttttaaatgggattgtttgcttttttgatttttgatttaagttcttatagattctggtattaggcctttgtcagatgcatagtttgtgaatgttttctctcattctgtaggttgtttgtttactctgttgacagtttcttttgctgtgaagaagctctttagtttaattcggtcccactttttttatttatgtttttgttgcatttgcttttggagacttcacatgaaaactttgccaaggcctatgtccagattggtatttcttaggtttttttctacggtttttacagttttgggtcttacatttaaatctttaatctatcttaagtggaattttgcatatagtgaaaggaaaaggtcaagtttcattcttctacatatggctagccagctatcccagcaccatttattgaaaaggagtcctttcacaattgcttgttattgttggctttgttgaagatgagatggttgtatgtgtgcagcttcattattgagttctctcacctgttccattggtctatgtctctattattttgccagtgccattctgttttggttactgtacctttgtagtatagtttgaagtctagtatacaataagataccatctcacaccagtcagaatggcaattattaaaaagttaaaacagtaacagatgttggcgaggttgtggagaaaagggaatgctgatacactgttggtgggaatgtaaattagttcagccactatgcaaaacagtttggagatttctcaaagaacttaaaacagaagttttcaactcagtaatcccattactgggtatatacccaaaagaatataaatcagtctaccaaaaggacacatgtatttgaatgtttattgcagcactattcacaatagcaaagacatggaatcaacctagatgctcatcaacagtgtactggataaaggaaatgtgatacatatataccatggaatagaatgcagccataaaaagaatgaaatcgcatcctttgcagcaacattgatgtggctggaggacactaaactaagtgaattaatgcaggaacagaaaaccaaatactgcatgttgtcacttataagtgggagctaaacactgggttcacatggacacaaagagaggaacaatggagactagggtctacttgagtggggaaggtgggaggggggtaagggttgaaaaactgcctatttggtactatgttcactacttgggtgatgaaatcatttgtacaccaaaccccagtgacatgcaatttacctgtaacaaacctgtacatgtaccccctgaacctaaaataaaagttgaaaaagaaaaagaaaaggtctatttcctacccataactatctccttttcatgccatgttatggcattactttgccatattacaaatttatttgtttgtcctctgccatccaaactagaataaaagctcagtgagggtagggatcagatcttttttactcactgtattattcccagagccttaaacagtgcctgacatgaggaatgtaaatatattttagatgaatgaatttattaaataaatgaatagaagatgaagtatctcttcagccaggaatagactgaagatatacaatcttctattaaaagccctcctcatcttgcgtatggtggcttgtaccggtctcaattctttggtattgatatcatactgtagttacacaggttgttgacaatggagaaggctgggtgaagatgcttgaatcctccctgtatatttcttgacaactgcctgtgaatcaatactcatttcaaaattaaaggttaaaaaaagtattagtaatattctgtcactagctaatcagttctgtcctacggaagtataacatgagccacatatgcaaggcacatatgtaattctctagtagccatttaacataatatatcaagaatattattccagcatgtaatgaatataaaaacattagttagtttacactttttttcaaaattgagtgtgtacattatacttacaatacatctcaatttaactagtaacattttaagtgatcagtagccacatgtgtctgctatttgtatcagacagtacagttttataccataaagttggtggtcagtatataggattttatgccattatttcttgaactctgaatatgttatatgctttctgttgcatgtgtatgataattttgggacaagggtacatacaagggaaacacctaaatgctgatggtcccacttacaactgaacaaaaaaatcctttttcttctccattaatacagaaacaaaacctgaagagattcctgaatcccagactaataatcaaaatattcatatccacatctcatccaaacgccgagaatcacaagggcccaaaaaagaagacactgtggtgggagaaggtaagcttggagggtggagatgatccccacaggagagacccactgtggatggtctgagcctccctctccttcagctctgtctctgaagcaatttggtttatagccccttcttagtctttgttactttccttcaaagaaattataccccagcagaaaaatacacaggtctggctggttcactcagctattcaccaattatttgaattgatatttatattgtttttagtagaagattattggtttaacatttgagtttgttacatagaggaaaggggaaaccagagtataggcatataatctttcctttagctattgcaaagctgccaatttggcaacattattgaatttgggaaagaagagtacagttgccaaataccaactatgcaaattagattgagtacagaaccctcgacaaatgagtcagctttgttaagctgtgctttgttgtttagttgtacttttagcaaaatgtagtatttgcctctatggtgtgttatgtcagatgatattacttgttatattgttaaattgccattagaattagtgccaaacagagaaaagataagcatttgcctgggatgaatgctttgcccttgtcctactaagaatgctgcaaataggaagactgggcagagcacaagatggctttgccaagtatgggtatgatacatgaaaaatattcatataatttccatgggcctgaaacgttttaaaacatatactccaaagagtcaattatcatattttctgcttgaaaaggcttaccaatcttagtggttctgaatgcgtgtttaagcaaaaaatagcagtccaatgttattctgcctctaagtagctgagtgagatctttcatgtgtgtgtttatgtgggtgtgtgtgtgtgtgcatgcacacatgagcatgagtgtgtatcagtttgtttgcttgtttgtatatttttccatgaaagaaataaaggtttgtttgtttttttcaattttcccatcgtattagttagccatactccagttcctggacctgcaccagaaggtggtagagggtatgggggtgtggttgggagtgctattgaaataaatagagaaagagagaaggggatgggaattattcaagattccatctaagattattctaattttggtttttagaagcctcttgaccatattattgcatgtaaactcaggacaggtgtttgaacgctgccatctgaatagctcttcgtattcagctgccatctgcagagagtggcaggagcagtactaatctctctcttaatctcatatggccatttatgtgcatttcagtggcccgcttaaattaactacattatgccgtccacagtgcctaactgttttattaaggaacttttttatgtggtggcttattaataaattattaggaatgagacagggaaagggctctgtggaaaagtttagattgaagagaggggagcatcaaagaggccattttattaggacatacaagttaaaaatagaaaaatgtgttatccgaatcctcctctggggatcacagcagatttgtttccttatcttctaagctttgtacaaatctgaagagtatcgttttgaagacaaataatgaagcatctcctgcttttctttggaaattattaccagctatgaaacacctacttattggtagctttacataaattttgtttcattctattattgccatggcactttagtttcccttttccctctgtgtttttaaacttttaacatttgctgataaagtgactggctgtctctctctctccagcactttgccttcactaagcactgccatagcacttaggattattgagctgttggaactgagcatgactactagattcagattataaatttaccacattacagcttttaccaaaaatggcatggtacggtcagggtgctagaaagttgtgatgggggaagaagatagtaaagtatacatccctcctattttactgttgccaggttttttgatatcaagagccatctaagccctctttaaatccatgtctgctcatgtcactcttctactcataagatttaatgaattctcattgtcagttggagaatcaggagagtgtgacagttaagagcatagaacccagaagtccaacagactgggtttaaatctgactccctgttgacagactttgtggcctcaagtaagagaactaatttctccgtgtgtttcagtgtcctcatcagtaacatggccctagtgatactggccatagttatggttattatacagaataagtgaattggtgtcagtaaagagcacagaacaatttcaggcacactatgtgtgctatatatgtgttcacatccaagggtcttttggattccagtagttattacaactgctggggaaaaaaaagacccgcccctgccttcttctaaaagaaatgtattaatagaaattttatccaagttcaccaactatacaaaaggatgatgaatgcacatttttttggggtcctaacagttttctgctggctgctttagcttcatgagaatgacagggataggaaaggacagagatagcttcatctggaagcaaaggagctgagaactagaaattgtctcaagttctcaggaaagcaaaactatgtttggaaattattgataaataatgtgtccatgtcatataataaaaaatgaacattttctattttaaaacatggataaaatatagtagttgtcccacaagacaacttcaaaaaataatcaggaataacagcatgcccactgaataagatgaagagcctggtatggtggtatgcacctgtatttccaactattcaggaggccgaggtggaggattgcatgagcctaagagtttgaggctgcagtgagctatgaaaatatccactgcactccaacctgggcaacataataaaaccctagtctcttaaaaaaaattaaaaaagaataaagagttccaattctattttcaatcaagatccaatatcataattaacaatggaatattagaggaattcatattcaaatgaggaaaacacataagtcattcttaccataattttataacatatattttggaatgctaagaaacacagcatatataaaacaaattggccagtcatggtagctcacacctgtaatcccagcactttgggaggccgaagtggacagatcacctgaggtcaggagtttgataccagcctagccaatgtggtgaaaccccgtctctactaaaaatacagaaaaaattagctgggtgtggtggcacatgcctgtagtcacagctactcgggaggctgagactggagaattgcttgaaaccaggaggtggagggcgcagtgggccaagatcatgccactgcattccagcctgggtgacagagcgagactccatctcaaaaaaataaaaaaaatagataaataaaaatacaacaaattaggaggacaatgatggaagttgtttgcagatgatatgcttttttaagaataacttaaaagattcaaccattaactaccatgatttataaatattttgaataactcactcaaatataatgtcagtccaaaaaattgtataggtcaatggtatatatttagaaaaaaaataaagaaatgtacaatagagaccaaaggatatactgccttgaaaaaagtcttaaccagtgttatgttgaacctatataaaaataaactataatttattaaatagtataaagagaagacttgaatacatagggaattatagtatgtttccaattagattgactattattgcaaatgcctcagtttttctcaaataaatgggattaatgcaattccaatcattctttgcaatgttgaatagcataagatggattccaaagttcatcagaaaatatagactaatgatacaaagccaattttctaaaataaatagattttatgatagtggaaatgggtagccctatcagggaaataatatttatgtcactattcttaagataatgtgattctgttacaagaatatatgggcacattagtggaaatagccccaattaggtagatatagatatcatatataggtaatagatacaggaatgaaatatataataaaagagaaaataaaagtaaatataaaggaaaacagtttataaaaggtttagcaaatttgactatttagaacatttatcagtctcgattcacattttataaaatattacaaaggaaattccagatggattaatgagttaaattaggtttactaaaacatatccatttctagagtatcacaaaaacaataaaatgcagattacttatgatataatgtgcaactacagacattttcctttttatttttctctaatttttatgcctcctcaattgtcatacattgcttattaagaagaaataatatttttcacataaaggaacaaattctctagagaagatagaagcattagtatttaattatggcatatacattccctgatatgtgggcaggactattgcccattattgacaaatgagaaaccaagatggttgattcttgttgttggttgatctgtttttcatccttctgcttcagatcctgtttaggctcaaaagtccaggctttctgtactgaatccagatcatccaatactgaatgttgcacatggaactaggctcaaaaaatatgaacagggtagggggaggtagagagagagaggggagattcattgttaatattcttattgcaaaagaagccagtgactagtacccacacaaattttaaaagtcaaaggcacagtgcatatttgctgctcaagaaagttttggaagttggaagaggctaaggatagctggaaaagctgtagctgactgtgggtggacccgaaagaacccagaaccagtgagtcctcctttccatagagaagagatataggttccccatattgtatcccattttccctaaaacttgatcaaatccaccagtgggattctaagaggcatggaggaacagtttaaaatcccatcttttcattttaatgggaactcatcaacaaggcagaggtggaaaggaggcatgacaattcatatgttttgatactcactatccttccttccctaaaacccaaacattcagctgaatgccttaggacacgtatctgctataaattcattttttatctaatttgtctgagatctaagcttcctgtggaggtccaagatcaaaggatttgattccttctgatgtcggcgctgacacataatgtgtgctgacttagttctgtctataacctcatagtaggaggtggccagcctctctgggcacctttacacagtgaactttcatttcggctggggagtctgtcaggtatgttgctgattggagctgccatgtaaataattcatgggagatttttaaatgttttggggtctgcaaaggaaagctatgcttgtgttagtctttcatgaatagatgcggacttaaagaacaagggggaaaagatttccaatgaaggtctctcaaaaacaagataacagtatcttcaatgggttgaaaataggcgacttgcagtgtttgattcctcttgtatgaagcactattggttttaccaagggattaaaattcaaagccttttttgtctttttaaagtttgcttctacctgataatttattattcttgttctttggttatttgctgatcctgataaactatgtcttttccacctggtgggagcagtaattatggagatgatgcccagctcagtgcttggcagaggactgggcataatgagggagcaaggttgacggcacacaaacatttcttccttgaaggaactcaaattcctaagaggaagatgagactgttacataaggaaaggtgactaataatagaagcaactgtgcaggtcaaatgagaaactccagacaagtattgaggcataaatcaatgtagtttgagctgtgaagaaacacttctggaaggagctgcaggttccttaggaaaactagggtaacctgaaagttcttatagctctaagcaagagaatcatcccatagtttgatggctgtagaagatacatgctagacaaatggactgtggaacaggagacagaaaatgtgaataacatgggcttatcataatattagtagatgtgtcatggaaataataggaacaacatgattatctttttttactgctctaaatcaaaagcattatatatatatatatacatatatatatatgtatatataatgttattactttctctcatccttacctcattttccagattaaattgaagtgggaaattggtattgtctatcccaatactgtctcttatagtatgaatcagacaggattactatctcctaacacaaaccaagacagctctcaatgaactcaggaaaaaaataacaaaaagcttaataagttaaggatcttcaatacatacaaatgcgtggttaatgtatttggtggtgagatgtgagaaaagcagggacagtaaacgtagtaaaagtagatgacagtattaccatctaccccccagggtttaggacaagttcaacctttttctcactgtaaggcatatgaatagtgacctttgcatgcatggtatactcccatgcatgtatcccactgaacattcttaactttccattgcagtctttatctttacacagtattatatggtgcctagatcatctgtttatgtatattgtactcttctgagttgatgtttaggtctgtttaatagaaaaataagagacaaataaaatgtcaaagaggaaatcaattaaaacaacattgttaaaataaatatattttagtaaattttgaagtagcacctgagaataaattaaattatgcaactaaagcccagagaggctgaaaggatgaaagtcatgaagccagatagcaggagaaggggaacttgggcctaattttgtgacttgagtgtaatgtgccatctctctttctactgttatgcaaccatacatgtacacactcatatacatagatgtttatgtgattatttctgcaaatatttatattcatgtttttataataccaaagatatttacattgtgaacttggtataagagcctaagtattagataggactggtttttatagttcatatctcttaacacaggtgtgagttggcctgttggtaagttggcctgttggtaagttggcctgttggtaagtgtgagttggccagttggtaaggcctgaccatggtctggtttttgcattgaagcctagcgcttacaatgaaaaatcctcattcaattatcaacatcatgtaagtattttttgaggaagaagtattaccaattttttattacatatttggagtgtctgataaaagatatttggaaatcaaagagctgatgtaattcaatctttgatttgacaatatcttgtcagaaatgctaagtatgcaaaatgtgtaattaactggttgaaaactaaatccatttcttcccctatttcttttccccccagatatgagaatgaaggtcatgctgggcaaggtgaaccagtgcccccaccagttgatgaatggagtgtccagaaggaaagttagccgccacattgtccgagaggaagaggctgctgtgcctgctcctggtactactggcatcacatcccatgggcacatctgtgctccaggtgctcctgctcagcaggtgtacctgcaagagactgggaactggaaggagggccaagagcagttgctcagataccagctggcaggccaaaatcagctgctgctgctatgcccagacttcagacaagagaggcagcagttgccagggcaaagtcggctgagtaagcaaagtggcagcttggggctttcccaagagaagaaagcctcctgcggggccactgaggcattctgccttcattcagtacacccggaaactattcaggagcaactgtgatcagggaagttgggggcatttggcctgaaaggcagaatgttcccagtatttctggataataagctggggaagtgaggactgtcctgctgggacaactaagaagagagaatgtggactctgaatccctttttcaactttaaaatggaaaacagtcatataaatgcttacagactgaaaaatgtctcatacatattttgcagctatcatgatcctagttcaatgctaggcaaataatggcacttgttaattatttaccagtttttaacttaagcctgattttaacaacttgataatggtgtaatactgacttataccagcaggggttattattaagcattctctggattgaccacccacaatgctttgagcttcttttatagaagggatcatgaaaaggtctggtcagctacagtttaattccacactgttacagaaaagcatttctttatcctgtagtagcatttgaagggacagttcaacaccctgctccctgatctgtcagagcttaccttccaaccacaaggcaacttcctggctttttacaagtggattttatttcatggtttaaattcaatcattattgagaacctacagtagtgtgagcgtatcaaatttgcacttcatgaggatttacacatgaaaattgatattctcatgggctttgctgagagtttagttaaggacaaagatgtaaaaatgccaaatttgggaaaggaaattttgtatgaccactgttctatttttcagtgattctctctgttagtagctgggtcacatttacaactggaaaagaactacattgggagatcagagaaagccaagtggccaagtcctttatcaaaaagctgctttttggagaagatgatgcataaagctgtgatactaaggagaggagagattatgtcatatgcaactgctctaggctgtgcagggggtttaaatggagatcagaacaaaggctcacctggtattgatacatttggtaaggttgttaaaggcaatttcaccaaattcacacatttgtacggggcccatttcttttcaaactgaagaatactttaaacagcctgactgtgtccttggctctggatccagaaggccttatgctccaagcatgtaaagaaaagatcgcaggaatgtggagagcttccaaaaagagattgctctcagattttcctgaaaatcctgaaaaccaggattttccaatctctacaatgttaaggggttgttgtgtagttgcattggaagagagaaaggaaacacactctttcattgctgaattctaaataatgatgccctgaattagttctatgagaagtactggcagacagctgttatgtctgcagggcatcaaggggcaggtgtgtctcaccctactaagaattggcagaaatgttttaacctcttctttaggcatctggtgagtattgcagatcttcaggctgtccctaaaaggaggtaggtagccttctctgtggtcactgtgttggatttggaagaaaatataagtagatgttaaggtcagtgctctccaggagatttcaatccaggctatctgtgttcagggaatgatttgcaagaagttggtttatagacgtttactctggaggcacaagctggctgccatgctgagtaagtcctctttgtagatgatgtattttgcttgggcaccaacagaattaaaaacgaaaaacaaaaaaaaactcgaatgacttaggcagaacatgccttccctagtttaattagtccctgttataaccagttatttatctttttttgtagattctcggtcttgaagtcatttgcctttgcaatctctactttagtatactcattggatcctcaaagagccgtaagctttttggaaaaaaacatttcagaagtgaaggcttttgaggtttataaaatggtagcagtcttagtccttgccctgcctcagtttacctgcacatgctttctttcatttcctcggattctttcaccactttttaagttttttttccacaggtatttttcctgagctctataccatgcatttagctgcctagtgagaatatccagtaggttatcctatagttactatgaagttaacacagcccaaaaacctacttctccttgtgtttttttccaactcaatgaatgacatcactgcactcagaccagaaatctagaagtcagtcatgactcttcattctatttcgcccttcacaaagagttagctgccagctctgttatttctgccccttctttacccttcttccaatttttattatcttcttatttatcctctatgtgtcacaagaccagtctttctgggaggcatgttttatcctatccctctgcgtaggaataaccataattatcttactaattccatcccagaaaagcctgtgatccctgaggccagaattgactctttgggcctaaatagcagctataaacatcttcagtaacttgccaggctctagcatgtggcatggaattttggcatctagctaaaattcctcaacccatagttaagctactcctctttctcctaaaaaaaaaaaaaaatgagagaattagggaaacaccaaaagcaaagagagcagctctatgttcattcatgtctggagatgagccaatttgagcaccactgtaggccaactctaaatttattcagatcgttaacatgggtaacccagcaaatatttcccagcagtgacaatctacaccctttatctaaataaatattgagatgtgcttttttcctgtgttagttcaaagaatctcttcttgcctcccattgctgattttctgtattgatggactcatttctctcaagagattggacaagctaaaattctagagagttcaaaagtgtttgaaagtacattttaagtgttctcaccacaaaaaatgctagtgtgtgaggtgatacatatgttaattagttcaactgatccattccacaatgtatacatatttcaaactatcgagttgtacatgataaatatatacaatttttatttgtcaaataaagaacatctataaatatttatagatttcaaaattgagaaagaagtatatatggagccacggttgttttgaccatttctccatgctttttgtttggggagggggacattttttggggggcagggactgtgttcagggaaagtacctgaccaacagaacttcaagtctcttccagagtgcgagactcagcttatctgatcaaggtgaacttgcccttcaatagacttgcccttgttactgcccagtgaggccaccaaggaccaagaacagttgagctctctcagggccttcccctttcaacaatttagttgaatgactcccttccatctatcagtcttactccaaatatatgaaattactatacattgaaatgcctgcaaactatatgcaaaaatgagtatgaggaaatcaaatgtaaatcatatgcaaatattattcaaccaagcttctataaaattgtacgtgtcaataacagtaaagaattttaattaattctgtcatttaaaattcatgcattccatattttgctttcagaacttatagtctatgccaattttgaaaaaactataagcacaaggaattaaatactattgagtatagaactgttgatttcaacatacactatagcactttgactaattacagatatatttgatagaaaagtcacatttctacaaggtaattttcaaaaagaaataaaacatttctgtaaacttaaatgtggattaagtggcagaatacagagatttgaatgtttacaaata

SEQ ID NO: 24 - DNA, 71219 bp, Homo sapiens
  source 1..71219: mol_type = genomic DNA; note = RPGRIP1_gene
ggaacctagagtactaaaggacaccagaacattgagagaaaagaattagcgacagctatctggagcaagcaagaactgtaagtttctatctgatgcatatttatagtttcctatgtcttccctaggggtgtttttgagaagaatgaaataagtttattcttttttttttttttttttttgagacagagtcttactctgtcgcccaggctggagtgcaccggcactatctctgctcactgcaacctctgcctcccaggttcaagcgattctcctgcctcagcctcccaagtagctggggactacaggcatgcgccaccattgcccggctaatttttgtgtttttagtagagacggggtttcaccatgtttgccaggctggtcttgaactcctgacctcaggtgattcacccgcctcggcctcccaaagtgctgggattactggcatgagccaccgcgcctggcctggtttattcattttctattgtaccaccagtctcccaggcatccagcacaacattaccaagtcatctttaatcctgtcaccctcttaactctatctcacgtccaaccagttgtcacatcttttgattctccttcctcagtgtcttcatgatccatcctattcttccatcccccacccccctccttccctagttcaagacttcttgcctgaactatagcaatatcctcttaacactgttctctccccaatttccaaatcactaatagtagatgaatcttcctaatgctcttccatagctctaattatattgctcttttgctcagaaatgtatccactatctgcagaatgaataaaactccttttcaaattaattaatttttaattgacaatttgaaattgtatatatttattgtgtaaaatttgttgctttgaaatatatatatagagagagtggaaaatggctaccttgggcttttcttttttttttttttgagacagaatctctctctctcgtgaggctggagtgcagtggctcaatctcggctcactgcaacctctgcctcctgggttcaaacaattctcctgcctcaacctcccgagtagctgggactacaggtgcgcaccaccatgcccagctaatttttgcatttttagtagagacagggttttaccatgttggccacggccaggatggtcttgatctcttgatcttgtgatctgcccgccttggcctcccaaagtgctgggattacgggcgtgagccaccacacctgcccaatcttgggctaattaaaatatgtattacctcatatgctcatcaattttttgtgtttgatgagaacacttaaaaatctactcttggcccaggcgtgttggctcacacctgtaatctcagcattttgggaggctgaggcgggtggatcacttgagatcaggagttcaagaccagtctggccaacatggcaaaaccctgtctctactaagaatagaaaaattagctgggcgtggcggcttgcgcctgtaattgcagctgcctggggggctgagacatgagaattgcttgaaccctggaggcagaggttgcagtgaggcgagagcataccgctgtactccagcctgggcaacagagtgagaccttgtctcaaaaaaaaaaaaaataaataataataataataataataataataataatcagagtaaggggaactggctacaaaattttaaatgcttgcccagtgatacagagtgtaaaaaagaaaaaaaagaagtctgggcagggtggctcatgcctgtaatcccagcacgttgggagaccgaggctggcggatcccaaggtccggagttcgagaccagcctggccaaaattgtgaaatcttgtctctactaaaaaatacaaaaaattagctgggcatggtggcaggtgcctgtaatcccagctactctggaggctgagacaggagaatcgcttgaacccgggaagcggaggttgcagtaaactgagattgcaacattgcactccagcccaggcaacaatgtgatactctgtctcgaaaaaagaggaaaagaaaattttaattgctgatgtcatcaagctggctttatacgtctatccatctatcactagtaaagggttcttcaccctcactaacctatacttgtccaagtgcactgcaattctgaatatcactgcaaggaaatttttttttttttaagacggagtcttgctctgtcacccggctggagtgcagtggcgtgatctcacctcactgcaatctctgcctcccaggttcaagcaattcccctgcctcagcctcctgagtacctgggactacaggcacgcaccaccatgcctggctaatttttttgtattttagtagagacggggtttcactatgttgaccaggatggtctcgatctcctgacctcatgatcagcccgcctcagcctcccatagtgctgggattacaggcgtgagccaccacgccgggtggaagtttcttcagtctttcatcctgttgagttcaaaacaattgataaacccttttagaatctacattccattttttttttttttttttttttgagacagagtctcgctctgtctcccaggctggagtgcagtggcgtgatctcggctcacagcaagctccgcctcccaggttcacgccattctcctgcctcagcctccccagtagctgggactacaggcgcgtgccaccacacccggctaattttttgtattttgtagtagagatggagtttcaccacgttagccaggatagtcttgatctcctgaccttgtgatccacccatctcggcctcccaaagtgctgggattacaggcgtgagccactgtgcccggcctacattccactttttcattcctgagaaattaaatctggccactggatgttcaacacgccttcactgacagtctcaactggcttttcttctctagcattccaataaactccatttcattcttagagcttctgtgacttcagttttaatgatacttttcaattgctccatagtgccatatagcattggtggtgcgtcaatgtgctctgggcccagatattaagaacaacagcatcccttctactacagctccatttttgcaaatggcttcaggtccagaggaccaagcttatgatgcagtcacctttccttttccttcacattacttttctacagtaggaaactaggaaggtgggtgactaagtaaacctgtagatgctactctatttattttatttattattattattttttgagaagctgtctcacactgtcgcccaggctggagtgcaatggtgtaatcttggctcactgcaatctccgcctcctgtgctcaagcgattctcctgcttcagcctccagagcagctgggactacaggcatgagccactacacccagctaatttttgtatttttagtagaaatggggtttcgccatgttagccaggctggtctcaaactcctgaccttgtgatctgcccgcctcggcctcccaaagtgctgggattacaggcatgagccactgtgcccagcccctatatatggtacttcaaatggagatttacttgtaaactaaatgcagatttactttttttttttttttagacagagtctcactctgctttgcccaggctggagtggagtgcagtggcacgatcttggctcactgcaatctccacctgccgggttgaagcgattctcctgcctcagcctcccgagtagccggattacaggcgcctgtcaccatgcccagctaacttttgtcatgtggctgggctagtctcgaactcctggccgcaggtgatccatccgcctcagcctcccaaagtgttgggattataaacgtgagccaccgtgcctggcctgagatttacttgtaatcctaggtctaacatgcgaaagtacttaaactttggggtgattattcagctttcttaaaataggcatgctatgaaatctgtatagatctatttaagactatgacattggaaagatgctctccatttattgtgatttttaaaaatgaaatgttacagaacagagtatgaattatccaattcaagttaaattgcccggaaagcagatcaatacaatgtttacattttctctaggtgatagaatttctccattatactttttgctttcttctttatatttctctgtttgttcaaaataagcttctgaacacccttctccagttgacaagtcaagctagcttcaacaaaaagggagaatttgttgtatagggcacaagactctactatagaacctaaaggtaggaacagagccagacagtggcatttatggaaatagggaaagactgggaaacaatcagactggtaagagaaattacaattcctctttgggaaaggtgagtttcagttgtctagtatgtttactaggggaaacatttgaaaggggaaatgtttaaaaagaatttgtacaaatctgaaagtcaaggctggagaactaaattttttttttttttttttttgaagatggaatctctctcttgtcacccaggctggagtacagtggcacgatctctgctcactgcatcctccgcctcccgggttcaaactattctcctgctttagactcctgagtaactgggatcactctgtcgtggcacatgtcaccgcgcccagcaaatttttgtatgtttagtagagacagggtttcaccatgttggccaagctggtcttgaactcctgacctcagatgatttgcccgcctcagcctcccaaagtactgcgaatacaggcgtgaaccactgctcccagctgagacataaattttggagacaaaactggaaaagactggaatcaagaacagaatgctttaagaactttttgactcacttcagtccctcagtgtcattctctctcttgttcgttcattctacttttcatacattcggtgtttatttgttgagtacctgctatgtgccaataactgttcgggtactgcatctatagaggtaaacaagataaaccatttttctgccttcaaagtcactatgttttagtgagaggggacagacaataaactagtataaataaatgaaggtagtttctgtgtatagtaaatgtcacaagggaaataaacagggtgaggtgacagagtataagactggtaagagaaggggaagtgctcagttcagctaccaaagtcagagaaaggcctcctggcaaatgaaaagatgcttgagagaccaaaggatcagatggagtcagccaaataaagagcaagaaggaggccaggtgcagtggctcaagcctgtaatcccagcactttgggaggccaaggcaggcagatcacaagatcaggagatcaagaccatcttggctaacatggtgagaccccgtctctactaaaaacacaaaaaattagccgggcatggtggcacgtgcctgtagtccgagctactcaggaggctgaggcaggagaatcacttgaactcgggaggtggaggttacagtgagctgagatcgcgccactgcactccagcctgggtgacagagtgagactccatctccaaaaaaaaaaaaaagagcaagaaagagcttgatggttgggagagcaaagagagggcaagtggtgaggagtgttgtgagctagaggaaggaaggtacaaggtgtgattggaggaataagaagcggatcagctgaggttgggctttacaggccctggaaaaaaagtgtaaattttactttaagtgtaatgaaaagccatttggagacttttggcaaagaaatgttatgaactgggttgttttatacaggtcactctgggtgtttcaggcagaaataagggaggatgggagaggaaaatggggagagcattaaaaaatgtggtagttgaggaaagagacacagatcacttgaattttagtggcggagacaggctaatatatgttgtttttgtctgtgtttgttttttagacagttttgctcttgttgcccaggctggagtgcaatggcacaatttcagctcactgcaacctccgccttccaggttcaagcaattctcctgcctcagcctcctgagtagctgcgattaaaggcacccgccaccacgcccggctaattttttgtatttttagtggagacagggtttcaccatgttggccaggctggtcttgaactcctgacctcgggcgatccgcccgcctcaacctcccaaagtgccggggttacaggcatgagccactgcacctggctgatacatgttttaaaggaagaacctggagaacatgctaatgggtgagggaaagggaggaatcaaagctgcaggattggtaggacggtagtggcatttatggacctagggaaagactgggaaaagatgagactggtaagataaatcaaaattcctgttggggaaaagtgaatttgagatatctagtagccatgccaagagaaatgtttaaaaaaataagaaattgggctggctgcggtctgatgcctgtaatcccagcactttgggaggctgaggcaggcagatcacctgaggccaggagttcaagaccagcctgagcaacacagtgaaaccccatctctactaaaattacaaatattagccaggcatggtggcacatgcctgtaatctcagctacttgggaggctgaggcaggagaattgcttgaacccagcaggtggaggttgtggtgagctgagattacaccactgcactccagcctggatgacaaagcaaaaaacagaaaacaaaattgtacaaatctgaagctggagacaaaaattttggagacaaaagcatatacatacatagtatttaaagtcaggagactgggcctggcacggtggctcatgcctttaatcctagcactttgggaggcagaggctggaaggtcgcttaagcctaggtggaggctgcagtgaaacgtggttgtgccattgtactccagcctgggggacagaataagaccctgccaaaagaaaaaaaaaagaggaaagaaagagaggaaggaaggaaggaaggaaagaaaagaaaaagaagaaaagaaagagatgaaaaaaagagaaagaggccaggtgtggtggctcacgcctgtaatcccaacactttgggaggccgaggcgggcagatcacctaaagtcaggagtccaagaccagttttgccaacatggcaaaaccctatctctaccaaaaatacaaaaattagccgggtgcagtagtgggtgcctgtaatcccggctagactggatactatcatccaggaaaaaaagtgttggccagagtatgaggcaactctatagacaggatttcctgattattcaggccacagagctgaatatggtcatttcagagctcccaagtttacatagtagttctagccatccccagaggctaatttaaacttctcagttttattttcaacctcctaggagatagaatctgattggttcagcgagggtcatttgtcttgggtcattcgattaaccctggtccaatcagcaatggcttcggggactggattgtaggctataaactgattcctggggagtcagtccctgtaaattgagtggagagagggatagaggcctatttcgcagagaaaagggatggtcatcggcttccaggctgagcagacacttaaaaaaatgatccgaaatgatatccatcaattccataatcataaaaactgattttcattttggatcaagtcattcctactgaatacttgttgttactctttagtgtagagttgtccacactaccatgagaatgactctgacatgtcatataccatcatgaaagtgctgagaaattcctgctacaacttatgtacacgtttcagaagacatcctaaagttgcatgtaactgactggacttttcctttatttcagtgtcctctgggatctcttacagcttgggaacagagatcatgtcacatctggtggaccctacatcaggagacttgccagttagagacatagatgctatacctctggtgctaccagcctcaaaaggtaacttctacgcctgaggatggacaccttttagaattaaaagaactctcactgtggaacatcttgctggccttcacagagactgatttactttcagctcttttcttcagtcttctcacttttttttttttttttttgagatggagtctcgctctgtcacccaggctggagcacagtggcacaatctcagctcactgcagcctccgactcctgggttcaagcaattctcctgtcttagcctcccaagtagcagggattacaggcgtgcaccaccatgcctggctagttttgggatttttagtagagacaagttttcaccatgatggccaggctggtctcaaattcctgacctcaagggatctgccctcctcgggctcccaaagggctggtattacaggtgtgagccactgtgcctggccctcttctcacattttattcttaagttctttttttttttcttttttttgagatggagtttcactctctctcgtcccccaggctggagtgcagtggcccaatcttggctcactgcaacctatgcctcccgggttcaagcagttctcctacctcagactcctgagtagctgggactacaggtggccaccaccacgcttggctaatttggtatttttagtacagatggggtttcaccatgttggccaggctgatctcgaactcctgacctcaagtgatccgcctgcctcggtctcccaacgtgctggattacaggcgtgagccaccgtgcccagacttagtcttaaattcttacagtaaaagtattactgtgtgggtttaggaggtaaagctaaatactaccaccacaaacagcacaacaaaagccaagaacaactagtgggtttcactcatctatccttgtgattagcccttagcccttcactgtcactaagcagaagtgttcaatttaagatgaaagggctcagccctaccagagcttcttccacacattatttaagatatctttagggctgggcgcagtggctcatgcctgtaatcccagcattttgggaggccgagacgggcagatcacgaagtcaggagatcgagaccatcctggctaacatggtgaaaccccgtctctactaaaaatacaaaaaaattagctgggcgttgtggcgggcgcctgtagtcccagctactcaggaggctgaggcaagagaatggtgtgaactcaggaagtggagcttgcagtgagccgagatcgcaccactgcactccagcctaggcgacagagcgagactccataccacccccctcccccaaaaaaccatatttttctaactttggccaggcttggtggctcacacctgcaccagctactcgaggctgaggtgggaggatcacttgagcccgggagtccaagatcagtctgggcaacatagcagtaccctatctctaaaacaacaaaaaaaggtatttttgtaattttgctccactttcccatccctcaatcccaatcatggctaccgttgattctattttcacttgacttcacttctataaaattattttttgaggatagggcactttatgcactgcccataagtgtataaatgatgcaaccactttggaaaatatttgccattatctagtaaagttgaacgtgtaactctacttttgagtataaaattggcagaaattgcctgggcatagtggctcacgcctgtaatcccagcaccttgggaggccgaggcaggtggatcacctggtcgggagttaaaaatttgcagaaattaactcttgcccatatataccaggagacattaccagaatgttcatagcagtatttttttttgagacagattcttgctttgtcacctaggctggagtgcagtggcgtgatctcagctcactgcaacctctgcctcccgggttcaagtgattctcctgcctcagccacccaagtagctgggattacaggcacctgccaccacacctggctaatttttatatttttagtagagatggggtttcaccatgctggccggactggtctccaactcctggcttcaagtcatctgtctgcctcggcctcccaaagtgctgggattacaggcagaagccaccacacctggcccctgtttttatttctcctgggcacaaatctagatgtagaattgctgggtcatacggtaacactagtttaacattttgaggaactgccaggctattttccaaagcagtggcaccattttacattcctaccagcaacgtatgatgcttctgatttcttcactttctcagcaacacttgttattgtttgtaactgaggtgttatctcattgtatttttaaaaaaatatattctttcttggctgggcaaagtggttcacgcctgtaatcccatcaccttgggaggccaatgcaggtggatcacctgaggtcaggagttcaagactagcctggtcagaacagtgaaaacccatctattctaaaaatagaaaaagttaaggccgggcacggtggctcatgcctgtagtcccagcactttgggaggccgaggcgggtggatcacgaggtcaggagatcgagaccatccttcctggctaacacagtgaaacctcgtctctactaaaaaatacaaaaaaaaattagccaggcctggtggcgggcgcctgtattcccagctacgtgggaggctgaggcaggagaatggcgtgaacccgggaggcggtgcttgcagtgagccgagatcgcgccactgcactcaagcctgggcgacagagtgagactccgtctcaaaaaaaaaaaaaaggaaagaaagaaagaaaaagttagctgggccaggtggtgcacacctgtagtcccagtatttgggaggctgaggcatgagaaaaacttgaacccaggaggcataggttgcagtgagccgagatggtgccactgcactccagcctgggtgacagagcgagactccatctcaaaaaaaaaaaaaaaaggattctttctcgttatggttttgatttgcatttctctgatgaataatcacactgaccatttttcatatgcttatttgccatttgtatatctacttgggagaaatgtctattcaggtcctttgccaattttctttttaattcaggggccagttttgccaatttttaaattggattatttgtctttatattgttggttttaagagttctttgtatattttggacacagttgagaattttgtgcttctgaaagctttaactgttccacaaagtccatgaaacatgaactgactgagataatttttcaagttagaagagtcatagtgataggaaaccgttgttcaggaactacctacctggagttccagtcagtttggaagccacccacatatccaaaaagctaaaagaattcaatatttttcttcagtatcataaaagaaaaatagaagatgagaaaggggaatatttacaagtttattttatgaaaaaataagcttttttaggtttcattacaaacatgtccaatttcacttctgtcatttatgaaataactaaaagtagatgaagtacctttttttttttttgagacagggtcttgttctgtcacccaagctggagtgcagtggtgcgatcttggcttactgcaacctctgcctcccaaggctcaagcgatcctccagcctcagccttccaagtagctaggactacaggtgcacaccaccatgcccagataatttttgttttctgttttttgttttttgttgagatggagtctcgcttttgttgcccaggctggaggcaacggtgcgatcttggcccactgcaacctccacctcccagattcaagcaattctcctgcctcagcctcccgagtagctgggattacaggcacgtgtcaccacacccaactaatgtttgtatttttagtagagacggggtttcaccatgttggtcacgctggtctcaaactcctgacctcgtgatcctccggcctcagcctcccaaagtgctgggatgacaggcatgagccactgcacccagccaatttttatattttttgtagagagggatttcactgtgttgcccaggctggtctcaaactcctgaactcaagctgtctgcccaccatggccttccaaagtgttgatatcacaggcatgagccaccgcgtctggcctaaatatttgtcatatataaatatttttataaaggcatatggtcatgttataattttcttcctagtgaccttaccttcctagttgacctagcaacattattttgcaggttctttggttgggaagttgtatttttttttttcattctaagcacctcagaaacactgttttcggagaaaaaaaaattttgatgtcacaaatagataaaaccacattaagggaatatttttatagcatatattcaaaaattaatctagccagtgactcatgcctgtaatctcagcacattgggaggccaaggcaggaggatcacttgagcccagcctgggcaacatggtgagaccttgtcactataaaaaatttaaaaattggccaggcatggtggcttatgcctgtaatcccagcactttgggaggctgaggcaggcggatcacctgaggtcagaagtttgagaccagcctggccaacatggtgaaacctcatttctactaaaaatacaaaaattagctggctgtggtggcccatgcctgtaatcccagccattcgagaggctgagacacaaggattgcttgaacctgggagacagggagacggaggttgcagtgagccaagacagcaccactacactccagcctgggcaacagtgagagactctgtgtcaaaaaaataataattagccgggcgcagtggctcacgcctgtaatcccagcactttgggaggccgaggcgggtggatcacgaggtcaagagatggagaccatcctggccaacatggtgaaaccccatctctactaaaaatacaaaaaattagccaggtgtggtggcaggtgcctgtaatctcagctacttgggaggctgaggcaggagaattgcttgaacctgggaggcagaggttgcagtgagccgagatcgcaccattgcactccagcctgggcaaaaagagcgaaactctgtctcaataaataagtaaataaacgcaaaaaaataaaaaatatggttcccattcaccatgagatcagagcagacctgggccagtgaacactcacaatgaaaagtgtgctccagtttcctctgcttagaccaagcagaggctcttgtcctaggaggcagctttggggacagtttctcctgaccaaaaaaacaaacgagatggttcttggaaatcaaaaaaagtttttatccttttccttactgggtttttgaagacagtcatgggaacaatccttgtgtaggtccaaattatctaataaggagaaaaaaatagaagaataggctgggcatggtggctcatgcctgtaatcccagcactttgggaggccgaggcaggtggatcacctgaggtcaggagttggagactagcctggccaacatggtgaaaccctgtctctactaaaaatacaaaaattaagctgggcacggtggctcacacctgtaatcccagcactttgggaggccgaagcgggtggatcacaaggtcaagagatcgagaccatcctggctaacatggagaaaccccgtctctactaaaaatacaaaaaaattagccaggtgtggtggctggcgcctatagtcccaggtactcgggaggctgaggcaggagaatggtgtggacctgggaagcggagcttgcagtgagccgagatggcgccactgcactccagcctgggcgagagtgcgagactccgtctcttaaaaaaaaaaaaaatggaagaaattagctgggtgtggtggcaggcacctgcaatcccagctactctggaggctgaggcaggagaatcacttgaacctgggaggtggaggttgcagtgagccaagatcacaccagtgtactctagactgggtgacagagcgagaccctgtctcaaaaaaaaaaaaaaaaaaagaagaagaagaaactaaaaagaaaaattaagtaaaataaaagcctaattggatatttttatctagagaatgtactttctagacggaaggtcgagttatacctcatgctgtgataatatagaaagggtctccagggacccagtaggagtcatttctgtttttgtttttttttttttccaaggcagagtcttgctctgtcacccagggtggagtacagtggcacgatctcggctcatggcaacctctgcctcccaggctcaagcaattctcctgcctcagcctcctgagtagctgggattacaggcacgtgccaccacgcccagctaattttgtatttttagtagagaccgggtttcaccatgttggtcaggctggactcgaactcctgacctcacaatctgcctgcctcagcttcccaaagtgctgggattacaggtgtgagccactgcgcctggcccagagtcatttctcatacttcctgatttcctcataaatacttgactcaagatagatttatgctctctggacaagatgtgatgagacatctaaagggttcaaaaaataggtgtaaaaatactgtccatttactgttttctgggactttaggtaagaatatgaaaactcaaccacccttgagcaggatgaaccgggaggaattggaggacagtttctttcgacttcgcgaagatcacatgttggtgaaggagctttcttggaagcaacaggatgagatcaaaaggtacttagagttctccttaaattttttttttttttttttttttttttttttttgagacggagccttgctctgttgcccaggctggaatgcagtggcatgatcttggctcactgcaacctccgcctccagattcaagcaattctcctgccccagcctcccaagtagctgggattataggcatgcgtcaccatgcccagctaatttagtatttttaagtagagatggggattcgccatgttggccaggttggtcttgaactcctgacctcagatgatgcacccacctcggcctcccaaagtgctgggtttacagatgcgagccactctgcccggcccaaaaataatttttgaagcaatatttctttagtcaatttttttgccaaacatgtcgatagactgtgaccacaggacacagagcatcattaagagcttgggtgataatatttcagtccacagaataagagactggacaggttcctcccctggtcacaactgaggggatggagataggtggaatggtcaaaatttcagaggagaaaagcctgcaggggcaagtaaaagaaggggtctttatttacaaaagaaaactaaagatcgtattgatccctgcaggcatgttgtaagtgctatctatacatttatttatttatttatttatttatttttgagattttttttttttttttttttttgagatggagttttgctcttgttgcccaggctggagcgcaatggcatgatctcagctcaccgcaacctccgcctccaggattcaagtggttctcctgcctcagcctcccaagtagctgggattataggcatgcgccaccacactcagctaatttttagtatagacggggtttctccatgttggtcaggctggtcttgaactcttgacctcaggtgatccgcctgcctcggcctcccaaattgctgggattacaggcttgagccaccacgccagccaatttttatttatttttgagacagagtctcactctgtttgggctggagtgcagtggtgtgatctcggctcactgcaacctctgcctactgggttcaagcgattcccctccctcagcctcctgagtagctggaattacaagcttgcaccaccacgtcagagtaattttttttgttgttttgagatgaaacctcgctccgttgcccaagctggagtgcagtggcgcagtctcggctcactgcaacctccacctcccaggttcaagcaactctcctgtctcagcctcccaagtagctgtgactacaggcacacaccaccatggccagctaattttttttttttttttggagacggagtctccatctgtcgcccaggctggagtgcagtggtgcgatctcggctcactgcaacttccgcctcccggattcaagcgattctcctgcctcagcctcccgagtagctgggactataggtgcccactgccaccactggccgtgctgcccaggctggtctcgaactcctgagctcaggcaatcagcctgcctcggcctcccaaagcgctaggattacaggtgtgagccactgtgcccagccatgcctggctaatttttttttttttttagtagagatggggtttcaccctgttggccacggtagtctcaaactcctgacctcaggtgatccacccaccttggcctcccaaagtgctgggattacaggcattagccaacacgccaggccttaatatttgtattttttgtagagatggggtttcaccatgttggccaggctggtctcaaactcctgacctcaaatgatccccccatcttggccgcccaaagtactgggattacaggcatgacccatcgtgcccagttaatttattagaaatagtattaattagccagccacagtggctcacgcctataatcccagtactttgggaggccaaggcgggtggatcacgaggtcaggagttcaagaccagcctgaccaacatgatgaaaccctgtctctactaaaaatacaaaaattagctgggcgtggtggtgggcgcctgaaatcccagctactcgggagactgaagcagaatcacttgaacccaggaggcagaggttgcagtgagccgaaattgtgccattgcactccagcctgggcgacaagagcaagactccatctaaaaaaaaaaaaaaaaagtattaattcatttaatagtctgaagaggtattattaagaggaaaaggaagcataaagaggttaaataagttgcctgagatcatacctagtgcataacagaggtggaatctctttttgttttgttttgttttgttttgtttttgagacagagtcctgctgtgtcactcaggtttgagtgcagtggcgcaatctcggctcaccggcaatctctgcctcccgggttcaagtgattctcctgcctcagcctcccaagtaactgggattacaagcatgtgccaccatgcctgactaatttttgtatttttagtagagacagggtttcaccatgttggccacgctggtctcgaactcctttcctcaagtgatccgcctgcctcggcctcccaaagtgctgggattacaggtgtgagccaccgcgcctgtcccagtgggaaaaactcttaacttcaaaacatattattatatacagtgatcttagatttctttctttagaaaatggggacctggaaagaaatctgagacggaggtgagggaaggtaaacagatgggaagaatgggagttctcaaagtctggagtctatctctaggacacattttgaagatactggtgtcaatgccttccagccaaggaccaccaggaacataccaacagttgagcaagctgggcttattcattacagctagagaatatgcacaccaggggaactaaaggcatctcagcaaatgtgttagaacttattatagtatctaagctttgtttgattgggtgattttgggggaggatccaaggaaacagaagtttgctccagatttcatgctgtcagaaagcaagcacaattctatgtttcggtatctcaataaattattctttctttctttctttctttctttctttctttctttctttcttttttttgagatagggtctcactctggcacacaggctggagtgcagtggtgcagtctcagctcactttagcctcaacttcctggaatcaagtatcaataaatcttatctacagggagggtaaactagtgcaaggctgaagccatgattggtaaagaagttgcagtcactcatattaacctggagagaaggatgtttggtattttgtgggtggcagtgacactaattttgtctgtaagcagacaaaattaggcagtggacttgttttgtatcattctatcatggttttggagtgaacttgtttcatgttgatgttctgtgaggtgtccaaaagaatagtggctgggcacggtggctcatgcctgtagttccaacactttgggaggctgaggtgggcagatcacctgaggtcaggagttcagagaccagcctggccaacgtggtgaaaccccgtctcttctaaaaatacaaagattatccgggcgtggtggcaggcgcctataatcccagctactcaggaggctgaggcaagagaatcgcttgaacccaggaggcggaggttgtagtaagcaaggattgcgccactgcactccaggctgagtgacagagtgagattcggtctcaaaacgaaaacaaaaacaaatggagatagcacagactagcttcaaacaacactgaggaccagttgtgtcagaccagtttcctaatgtcaagggcagtgttttgctttctcattgtaacccccaggagtgattaagatcttcgtttagaatctgcaggattggccgggcgtggtggctcatgcctgtaattccagtactttgggaagccaaggcgggtagatcactaggtccggagttcaagaccagcctgttcaacatggtgaaaccccgtctctactaaaaatacaaaaattagctgggtgtggtggtgggcgcctgtaatcccagctactcgggaggctgaggcaggagaatctcttgaacccgggaggctgaggctctagtgagcagagatcgcaccactgtgctccagcctgagcaacagagtgagactctgtctcataaaaaaaaaaaaaaaaaaaaaaagaatctgcaggaatgcaggcctccattgtggatcagcactcttcagagttggtgattttttttttttgagatgggagtttcgctcttgttgcccaggctggagtgcaatggcgtgatctcggctcaccgcaacctccgcctctcagattcaagcgattctcctgcctcagcctcccaagtagctgggattacaggcatgtgccaccacgtgcagctaattacagacagggtttctccatgttagtcaggctggtctcgaactcctgacctcaggtgatccgcccacctcagcccggcaaagtgctaggattacaggcgtgagccaccgcaaagggccgatttttttttttttaattgttgagaacttgagaatctagtgacttgagtgaagtcagaaggttgtatgggccaaaaaatctagtttcttggttgataatcaaagagtacttgagattatggatgctaaatggttaatctggattctatgcccctggctttgggcaagttacatagctattttacaccttgttttctttatctgggtataatgatatgtaataataatagctcacacctgaagcccttacagtgtaaccccactgttctaagcattttacatatatatttatatataagcttattaatcctcacaacaatctactgcttttatctttttctatttatctttatttataaatgaggaaactgagcacagaaaggttaagtggcatggccaaagctacagttagtaaatgtcagaacagacgggcagtgtgtcttagtcagctcaggatgccataacaaaataccacggactgggtggctgaaacaacagacattggttttctcagagttctgaagctggaagtctgagatcaaagtgtcagcgtggttggatcctggtaagggccatctttctagcttgctgactgctgctttctcactgtgtcttgggaggtgggagagggagatctcttgttacaaggccacagtcctatccagttagggccccacccttgtgaactcatttaaacttaataacctccaaaggccgggcgcggtggctcacgcatgtaatcccaacactttgggaggccaaggcgggcgaatcacttaaggtcaggagttcgagatcagcctgaccaacatggagaaaccctgtctctactaaaaatacaaaattagtattttgtggttaggcgtggtggcgcatgcctgtaatcccagctactcaggaggctgaggcaggagaatcgcttgaacttgggaggcagaggttgtggtgagctgagatcgtgccattgcactccagcctgggaaacaagagaaaaagtccgtctcaaaaaaaaaaaaaaaagcctccggaacacccaatgtccagatacagtcacactgggggttaaggcttcaacataagaattttgagtggggacacaattcaggccatagcacagtgagagcatagaatcagatagtagcaaaaaaaccatgattttaggtcaagataacaaataaaaattgttactaaaagttataaaggagttatccttaatttggagcacatatacaggggtgtgtagacaagtgggatagaaaaagcaaatattaaaattgttatttatatttgtcacccatttaaacatacatattttgttttataatgacaatttattagtacaaaaacaagtctatatataatttttttaaatgcacacaaatactattggggtagtggctcaactttttttttttttttttttttttttttactaagataagggtgtaatcactgcaataaaataaagacaggtatcacaatggccctgccctcaaagagttacagtgtactggggacagaaggctaatctttttaaagtgtggttaatagatcacggtagatgaatacatattatagatcaattcgtgattatatgtcccaaataacccgtagaaataataactgtcatgaaaggagaagccacgtgctctatttgtccacaggctgaggaccaccttgctgcggttgaccgctgctggccgggacctgcgggtcgcggaggaggcggcgccgctctcggagaccgcaaggcgcgggcagaaggcgggatggcggcagcgcctctccatgcaccagcgcccccagatgcaccgactgcaagggcatttccactgcgtcggccctgccagcccccgccgcgcccagcctcgcgtccaagtgggacacagacagctccacacagccggtgcaccggtgccggagaaacccaagaggggtgagatttaaggctacatcccctacagggctaagacactgggaaggactgatgtgccagccacgttttcctcactgccttcttctgcccaccaccccattttgttcttttgttctcactccctcctttctgcctccctaaaatctttatttcctgagttgggatatcagattcaaaattctaaattcaccatggagtgtcgctgagggcagaatcagacaacaggtcaggagatggagaccatccttgtccaacatggtgaaaccccgtctctaataaaaatacaaaaattagctgggcatggtggcgcgcacctgtagtcccagttattcgagagattgaggcaggagaatcacttgaactcgggaggcggaggttgcagtgagctgagattgcaccactgcagtccagcctggcgacagagcgagactctgtctcaaaataataataataataataataataataataataataataataataaaaaattagccaagcctggtggcacatgcctgcagtcccacctacttgggaagctgatgtgggaggatcgcttgagcctgggaggcggaggctgcagtgagcccagatggcaccactgaactccagcctgggcaacagagtgacactctgcctcaaaaaacaaacaaaacaaaacccccaaaaagaaaactcaacgttgaatctctagagtagacacctcattctcatggccctaaatcaggaatgagtaacctaggtaaaggaaatctacacacagcatttcattaagtactcttattttattagtaagtactcacttattttgcttagtgtggtcctataatttcaagttccatactccagacaaccaaacgcatgcaaaaacaactgaaagtagaaaacttgcatgaatttaaatttcagttccatttaacagttcagcatagctggccacctgttatgtactgggcactagatacaaagatggttagagttagacacacagtctctgccctggacaagcttccacctttcttttttcttcctatttgtacttactcacttgaggatctatagtctggctgactttagttgcagttttttgcaagagtaaaaaaaaaactgctcctcggggaccatttgtcatacaagggtttcacccaggtctcaagactctatgcccagcccttcatgttccagtttcagtacttggtgttccggagggtactgttgcccgagtctgcatcttctgtctaaacttttagggccaagggacaggctgagctacacagcccctccatcgtttaaggagcatgcgacaaatgaaaacagaggtgaagtagccagtaaacccagtgaactgtgagttcttctcatttatcccatgttgttattcctgccactttaattagaaagacatcatttagggaacaaatgaatgttggtgatttgagtcttttcagcatgatcagggaagatgaaagtcgaccctaggtcaaattccaacttcattgcttaaaagtggaaaacaagcgtctctctgttctctgaggaaatgaaaataaaggtccatttctcagttgaaggtattccctctatttacatttatatttttttccttaggtcataattcctttgttgtgttttttttttttttttttttttgagatggagtcttgctctgttgcccaggctggagtgcagcagcgtgatcttggttcactgcaacccctgcctcccaggttcaagcaattctcctgcctcagcctcctaagtagctgggactacaggcatgtgccaccatgcccagctaatttttgtatttttagtggacacagggtttcactatgttggccaggcttgtctccaactcctgaccttgtgatctgctcgccttggcctcccaaagtgctgggattacaggtgtgagccaccacgcctggcccataattcctttatgttttgtttgacatttgaaagctgtattttataagattttcctcgacatgtaccaaggttactgattcacttaatttctttttatatgtgtaagaacccaattctaaactcctgtaacaacagtttctaagtatcctttttgtatttagtgtttctggttctaacagcataatttctttcagcagtgtcataagtatggctaaacccattggtctatgcatgcctaacagtgcccacatcatggccagcaataccatgcaagtggaagagccacccaagtctcctgagaaaatgtggcctaaagatgaaaattttgaacagagaagctcattggagtgtgctcagaaggctgcagagcttcggtaagagtgtggcactccatgcctcaaaccaaaacgaactgaaaaagctaagagattcttatttatacctttcctccatctcagaggaaaagagtgtttgggattaaattcaatcggagtagtagacacggagtccctcgtaggttaagaaatggattaacctgcgggcaccatggatcacgcctgtaatcccagcactttgggaggccgaggcaggccgatcacctgaggtcaggagttcgagaccagcctcgccaacatggagaaaccctgtctctactaaaaatacaaaaattagccaggcatggtggcaggcacctgtaaatcccagctactagggaggctgaggcaggagaatcacttgaacctgggaggcagaggtttcagtgagctgagataacgccattgcactctagcctgggcaacaagaacaaaacttggtctcaaaaaaaaaaaaagaaaagaaaagaaaagaaatgaattaaccttctgggcgcagtggctcacgcctgtaatcccagcactttaggaggccaaggcaggtggatcacctgagatcgggagttcaagaccagcctggccaacgtggtgaaaccccgtctgtactaaaaatacaaaaaaactagccaggtatggtggccggtgcctgtaatcccagctactcaggaggctgaggcaggaaaatcccttgaacctgggaggcggaggttgcagtgagccgagattgcaccattgcactccagcctgggcaacaagagcaaaactctgtcaaaaaaaaaaaaaagaggaaagaaggaaggagggagggagggaaggaaggaaggaagggagggaggaaggagagagagaaagaaagaaagaaagaaagaaagaaagaaagaaagaaagaaagaaagaaagaaattaacctaaaggagataagtttatgtataaaaggatatttgctgcctcactatatagaaggaaaacgacttcatcctcatcaccagatagggattcttagccctctctgtgcataaattcctggaaaacttttttaaaaatgtatttttcagacaagttttagttttatagcaaaattaagcaggaaatagagttcctgtatacccattgcctccatacacacacagcctccccaactatcagcaccccgtaccagagtggtgcatttgttacaatcagtgaaactacattgacacatcattatcacctgaccatcatttaatagtttacattagggttcattcttggtgttgtacattctttttttttttttgagatggagtctcgctcagttgcccaggctggagggcagtggcgtgatctcggctcactgcaagctctgcctcctgggttcatgccgttctcctgcctcagcctcctgagtagctgggactacaggcgcccgccaccatgcccggctaatttttttgtatttttagtagagacggggtttcaccatgttagccaggatggtctcgatctcctgacctcgtaatccgcctgtctcagcttcccaaagtgctgggattacaggcgtaagccactgcgcctggccggtgttgtacattctatgggttttgacaaatgtgtaaggacatgtatccatcattatagcatcatacagaatagctttactcccccaaaagtcctctgtgttccacctagtcatgtcttttacctccagtcctggcaaccactgatctttttactgtctccagttttgcctcttctagaatgtcatatagttgggattacacagtatgtggccttttcaaattggcttctttcacttagtaatatgcatttaagcttgctccatgtcttttaaggtttgaaagctcattttttcaaaacaccaaataacattcgattgtctacatgtaccagtttatttatccattcagctaccgaaagatgtcttagttgcttccaagttttggcaattatgaataaagctgctattaacattatgtgtcgttttttgtatggatataagttttcaacctggagatattttaaaaccacagatccaggccgggtgcggtggcttatgcctgtaatcccagtactttgggaggccaaggtgggtggatcatttgtggtcaggagatcgaaaacagcctggccaacatggtgaatccccatctttactgaaaataccaaaattagccgggtgtgatggctcatgcctgtaattccagctacttgggaggctgaggcaggcgaatagcttgaacccgagaggcaggggttgcactgggccaagattatgctactgcactccagcctgggcaacagagcaagactctgtctcaaaaacaaaacaaaacaaaacaaaaaaagaccataacagatccctgggccccatctctgagattccctttcaattatttggggggtagaattcaggcagtgtaattttaagatctctccaggttattctaatcagcagctagacagggaatcaatgagatagagtggagtgaacccaaatcctccccagtatctctttcaatctttcaaacaataaagaaaacgtgagctcctaggttcaggaataatagtctttttttttttttttttttttttttttttttttttttgagacagagtctcactttgttgcccaggctgaagtgtagtggcaccttgtcagctcactgcaatctccatcttccgggttcaagcaaattctcctgcctcagcctcctgagtagctgggattacaggcacccaccaccacacctggctaatttttatatttttagtagagagggggtttcaccatgttggccaggctggtctcgaactcctgacctcaggtgattcgccttcctcgacctcccaaagtgctgggattacaggcgtgagcccctgcgcccagcctaatcttctttctattattttattttattttatttttattttccgagacagagactcactctgtcacccaagctggagtgcagtggcgagatctcagctcactgtaatctccacctcccaggttcaagtgattctcctgcctcagcctcccgagtagctgggactacaggtgtgcgccaccatgcccagctaatttttgtatttttagtagagacggggtttcaccacgttggccaggatggtcttaatctcttgacctcgtgatccacccgcctcagccttccaaagtgctgggattataagcgtgagccaccgtgccgggtgtattttactattattattattattatcattattttttgagacagtctcactctgttgtcgccaggctggagtgcagtggtgcaatctcggctcactgcaacctccccctcccaggttcaagcaattctcctgcttcagcctcctgagtagctgggactacaggtgcgcaccaccacacccagctaatttttgtatttttagtagagatggggtctcactatgttggccaggatggtctcaatctcttgacctcgtgatctgcccgcctcaacttcccaaagtgttgggattacaggcctgagccaccgcactcggccactattgttattttttgagacagaatctcactctgttgcctaagctgatttcagctcactgcaacctccgcctcccgcagttcaagcgattctcttgcccagtgtccatagctgggatgacaggcttatgccaccacacccatctgacttttgtgtttttagtaaagacaaggttttgccatgttgcccaggctggtctccaactcctgacctcaggccatctgcccgcctcagcctcccaaagtgctgggattataggcgtgagccacggtgcctggttcataatcttctttttaagttttctagcacgttcaaacctcactggtttctctaaggaaacggctgagacctagcttgacattgcaaggtttgtgggaaattatgaacaccatcatttaaaaaagtagttattatcttttctcataacataagcttaaggttagtgatctctatcaaatcttggctggcgtgatgagaaatgggagaaaggagattatttactagactgtacatacaccacatacttgtgttctagtgtgggtaagacgggaaggcaagagacaagagggaggtattcttactagggcatagtcaaggagaaaatgtctttaattctatccatgttcagacagaataatttagcgcctttctctgcagagcttccattaaagagaaggtagagctgattcgacttaagaagctcttacatgaaagaaatgcttcattggttatgacaaaagcacaattaacagaagttcaagaggtgagttgccatcatcagctgtgctttcttggtggggggaaaccccaattaagagattcatattattttctccattttaaatatgagaagccacaattcagaaagacaatttataagtgatatcacacaatttataagtgatattcaaatccaagcctcacaactcggagtctatgcttttcccagtatttcccattagttctctattaagaggaaggctcaagctctgcctgctaaggtgaaataaagtggagttaacttgtgtaagggttacggtcccctacgaagaccacaaccagaatgtgattaaattaggaagccaaaagcagtcacagggaagggaaggaaactagccttttaattagcactttctgtgagctgtactctgtcccagatatttacagtcatgatcttttttaagcctgacaacagccctcaaggtaagtatatttagcattagcacacattagaaactaacatctgattggtggaaatagagtatcaagggtcaaagtaaggtcagcaccatccttttattgaacaaatatttatccagtaccaggaattgcaaagcactgggatacaaagattccaagggtaagtaagaaaaaactgccttcaaggagtttataggagtgagaaaacaagtaaacaaattcaactatcctatgcagggtatgggcaggacacaaaagagagagtagtcagacccaccagtgggtgaggtgctgatatggctgataagtggaggaacaccagggctcttgtctcacgcgaattagataaaacgacacggacacaggtggagcggctttaaggagcggagagtttaataggcaagaaacaagggagaagaaagacggaagaagctcccctgtactgagacagagggagaaggactccaaagcagagaggggagacctcatgtgccgggaaaagtggctgcttatatgagtaggcaggaggaggtagtgtctgatttgcatagggctcaggggattggtttgaccaggcatgtcactcatgtagcctgtggaaaaaactggccctcctaccctagtcttttaatatgcaaatgaagggcgccatgatgttctacacacgtggggatatgtgggggtggccatgttgccaggtacaggtcggggaaaggacaggaagacaagggcgggaatcgccatgtttgggtggacccagtttctaaagacctgtatttgcatatcaaaggttgccttcccggctgtaagagccagggctttcctgctagacaaaaaacgtttctggagctgctttaaaggacgagaaaactttccaaggaccccttttcctctctatctgcctaaaattatttttaataactcctttaacagtgccagatcagaaaaggattaatgactgggtgcggtggctggagcctgtaatcccagcactttgggaggtcaaggagggaggatcacttgagctcaggaattcgagaccagcccagacaacatggcgaaaccccatctctatcaaaaatagaaaaattagacaggcatcgtgatgtgtgcctgtagtcctagctactatggaggctgaggcaggaggattgcttgagtgcttgagcccaggaggcagaggttgcagtgagccgagatcccgatacggcacctcagcgtgagactttgtctcaaaaaaagaaaaaagaaaaggattaataaaggaatagatttgtgagttaaatactgaaatactaaaagattagcttgtgttaataagtgtgtaagagaagagggggctttccatgagagcagaggtgagaaacatcaggtctggtcatgaaggacacactaagaattttttttctcgttgtcattaaagacagaacatgctaggaatttagactttatcctacaaacagcagagagctatgtgaaagggttttaagcaagttgatatgatcaatttttttctctctcaagattatttgaccttttttaaaaaataaaaaataaatttaaaaaaaaagtttgggaggctgaggtgggtggatcgcttgaggtcaggagtttgagaccagcctggccaacatggtgaaaccccgtctctactaaaatacaaaaattaggtgtggtggggggcacctgtaatctcagctacttgggaggttgaggaaggagaattgcttgaacctgggaagccgaggttgcagtgagccaagattgtgccgcagcactccagcctgggcaacagagtgagactgtctcaaaaacaaaaacgaaaacttacctctcatatttgctacaaggattaaatgagataatatgtgtgaaatgattataatgatcatgatgtggcaggtaatgaaacacatagtaacacatagcaactactcaactaattatagctgttgttatgatcattcttttttttttactaaaactgaagagatctttctgaagtgtgctaagtaacagtacctaatttaagattaaacatttttcttggataatccaccaagtacaatgcaaatgttaataaatgacccttcattcttttttgagaaatggtgtgaatgattgcagtcacagactacttggcaagctagggcaggggaaaaatagcaacaattagtaaacaagtacacaaattgatttgttttgtgggatttttataatgtctttaaaaatgttaagcattatattacagtgataaatatatcatgaaattgataaatcaataaaataataataatttctttcttccaggcatacgaaaccttgctccagaaggtacttaatgagaattgagtctctgtttcttagtaaccagaataatcaaacccaaagaaatctatgttcatctccaagtaacataacaccagaatttagctaactaaatcaatgttattatgtcatatagtttctgttaaaaatgatactattatgattatcaaaagatacagatacttattgcactgttttcataaaaattgaaatatgaaattgtagttgagaaatatttggcatggtatttttaagcctattgctggagcaaattatagcatttgctcaaaacttcctaagagtattcttctagcatgtgtgaggtgatgagatataacaaagttgttgcaggtattctcagatggtcttaaatatttggccctattcaccactgtgagtgggctgcatgtgaagctaggtgaatgtctgtgcttaagaatcaccactaagacagagttccaaacgagaccacccagctgtgcctcaccagaggagtccgccagaaacacacacagaacttctggagttaacatgtcacttgtctaggtacaaacgtagtcatcataaaaaagcagtcaaatagcttagaaagtgaaggcagctttggaaggtggcaactaatttaaagctagggattaatttgaaccttgagaaaattaaggctcaagggccaggcgcggtggctcacgcctgtaatcccagcacttggggaggcggaggcgggtggatgacctaaggtcaggagttcgagaccagcctggccaacatggagaaaccctgtctctattaaaaatacaaaaattagctgggcgtggtggctcatgcctgtaatcccagctactcaggaggctgaggcaggagaattgcttgaacccggtaggcagaggttgcagtgagccaagcactattgcactccagcctgggcaacagagcgagactgtctcaataaataaataaataaataaatacaagaaaagaaaattaaagctcaaatgatgaactacaattgcccagaatggaaaccctacctaccagggaaattatacttccagagaaatgctagggtgaaaaacaaggttaacgaacagtacaaaggtaataagctattaatcaaagtcattctttgtgacatctgttagagaatgctagggttgctggtgtctggagaccactcgtgctgagtgatatgaccattcccagaggtactttccttttgacccagaatcagggaatcctgagtgcagcccatgaggccctcctcaagcaagtgaatgagctcagggcagagctgaaggaagaaagcaagaaggctgtgagcttgaagagccaactggaagatgtgtctatcttgcagatgactctgaaggaggtaaataataatagttgaaagataccatctacatttcaacttcagggatgttagaatgtgtatcttagcaacaatatgagtattgcattttttcaaatgacaaaaacgaagctccgagtagttaaatcatttgcttaagattacaccattagagggaaagcttggatttgtacttatgtctgtttttcaaagtccttgctctttcataatgttttgctgcttccctagcagtagaaacccagaaacagtgaagacttattttggaaaatcctcattaatcccaatacaagtttctagccgaccttcaattggttcaagtctttctagttggatggcttctcagacactggagatggtgatagaaagcctctcacccacgcccctccctgccatggacaggggaaatcctgtgcaggggaatagattttaacattttatctcaagggctactatcactcttagtttcaggagagagttgaagatttggaaaaagaacgaaaattgctgaatgacaattatgacaaactcttagaaaggtgagtaccacatttgggtcccagagcagtgttactatgaaagacattatagaaagttcattcctaatacctagcattaataaatatatggggaaattggtactcaatattgttagtgagaatattaatcggcagtcttttggaagggaatttgacactattaaaatgttaaatgtgcatatcctcttttttttttttttgagatggagtctcgctctgctgcccaggctggagtgcagtggtgcgatcttggctcactgcaacctctacctcccgggttcaaacgattctcctgactcttcttcctttttatttttttaaccagcaattccttttttctttttttgagatgtagtttctctctgtcacccaggctggaaaacagtggcattctaggcttactgcagccccagtctcccaggctcaagcaatcctcccacctcagcctccccagtagctgggactacaggtgtgcactgccacacctggctaatttttttctatttttttgtagagacagggttttgtcaggttgcccaggctggtctcaaactcctgggctcaagtcatctgcctgcatcagcctcctaaaatgctgggattacaggcacgagccaccatgtctggcccccaaattttttggggggctggggggaatcaaaatgaaaaaattctcttgtgtatgtgcaaatatatgtatataataagaatgttgctgggtgcagcagctcacacctgtaatcctaacacttagggaggcagaggtgggaggataacttgcgcctagaagttcgagacctgtctgggcaatatagtgagaccctgttctccacaaaaagaaaaaaaaaaaaaagaatgtgaattactgccctgatagtaatagcaaaaaaacaaaaacaaataaacaaataaaaaggaaaccactgataagagattgatcacataaagcatgttgcatcctcacaatgaagtgctatgcagctgttaaaaatgagatagatggccaggcgcggcggctcatgcctgtcatcccagcactttgggatgccgaggcggccagatcacgaggtcaggagttagagaccagcctgaccaacatgatgaagccctgtgtctactaaaaatacaaaaattagccaggcacagtagcgcgcacttgtaatcccagctactcagacagctgaggcaggagaatcgcttgaacccgggaggcggaggttgcagtgagctgagattgcgccactggacttcagcctgggtggcacagcaagacttcctctgaaaaaaaaaaaaaagatacattgtaaaaagaaaaagcaagctgaaaatgaatatgttaactctgacatggtttatgttatgtatctttatggttccacaaacctttgatgagataagaggattagaataaggcaaaggggcaccttcacttttattcttttttttttttttttctcttgagatggggtttcactctgttacccaggctgtagtacagtggtgtcatctcagctcactgcaacctccacctctcaggctcaagcaatcttcccacctcagcctcccaaggagctgggaccacaggtgcacaccaccatgcctggctaatttttgtattttttgtagagatggtgttttgccatgttgcccaggctggtcttgaactcccaggctcaagtgatttttccacctcagcctcccgagtagctgggaccacagccacacgccaccacacccggctaatagtttctatattgtgcagagacagggtttcgccagattgcccaggctggtctcaaactcctgggctcaagtgatctgcctgccttggtctcccaaagtgttgggattacaggcatgagccaccgaccctgggctattctatatgctgatgtattattctaatttttcacaatgagcatgtattcatgcattaattttataattaaaaagaactggaagtggcctggcatggtggctcattcctgtaatcccagcactttgggaggctgaggcaggaggatcgctggagctcaggagttcacgaccagcctgggcaacatgatgaaaccccttctccacaaattattttaaaaattagccagccaggcgcggagaatcacttgaacccaggaggcagaggttggggtgagctgagatcaggccattacactccagcctgggcaacaagagcaaaactctgtctcgaaaaaaaaaaaaaaaatagccgggcagctgggcgcagtggctcatgcctgtacttctagcactttgagaggccaaggcaggcagattgcctgagcacaggagtgtgagaccagcctgagcaacattgcaaaacactgtctctactaaaaatacaaaaaattagctgggcgtggtggcaggggcctgtaatcccagatacttgggaggctgaggcagggcgaattgcttggacccgggaggtggaggttgcagtgagctgagattgcaccactgcactccagcctgagcaacagagcaagactctgtctcaaaaaaaaaatttggctgggcatggtggcgtgcatctgtattcccagatactcagaaggctgaggcaggaggattgtttgagcctaggaggtcaaggttgcattgagccatgtgcagtgcagtgcagtgagaaagtgagactctcaaacaaaaaaaaaacctgtaagtaaaagaaaaaagtttttaaaacttaaaagtgccaggctgtgcgcggtggctcatgcctgtaatcccagcactttgggaggccgaggtgggtggatcacgaggtcaggagatcgagaccatcctggctaacacggtgaaaccccgtctctactaaaaatacaaaaaattagccaggcgtggtggcaggtgcctgtagtcccagctactcgggaggctgaggcaggacaatgtcgtgaatccgggaggcggagcttgcagtgagccgagatcgcgccactgcactccagcctgggcgacagagccagactccgtctcaaaaaaaaaaaaaacaaaaaacttaaaagtacctttgatctagtaaaaggcagcagggggtagattgaggaggtcttacgggagcatctgggaacaactgatgttcttcagctcagtgaaataaagcagtgtggggagtatccacttcgatagacattactctgtgatagacattactatttgcctctccccttcatcactcaaaatactattttcttgagtccttacatgatatatggtcaggcaatgccaagaaatgttaatacttgcctaagtaggttattattattattattattattttttttttgaggcagagtctcactctgttgcccagggtagagtgcactggtgtgatcttggctcactgcaacctctgcctcctaggttcaagtgattctccttcctcagcctcccaagtagccgtgaccacaggtgtgtgccaccatgcctggctaatttttgtggtttttttttttttttttttgagacaaagtctcactctgttgcccaggctgagagtgcagtggcgcagtctcggctcactgcaacccctgcctcccgatgtttaagctattcttctgcctcagcctcctgagtagctgggattataggtgccggccaccacacctggttaattttttgtatttttagtagagacggggtttcaccatgttgggcaggctgatcaccaactcctgacctcgagatctgcctgcctcagcctcccaaagcactggaattacaggtgtgagccaccgcgcccagccaatttttgtatttttaatggagatggggtttcaccatgttggccaggctggcctcgaacccctgacctcagataatctgcccaccttgacctcccaaagtgctgggattacaggtgggaaccatccagcctggccggtaagttatttatttatttcttgagacggaatctcacactgttacctgggctggtgtgcagtggcacgatctcagctcgctgcagtgtccgcctgctgggttcaagcaattctccagcctcagcctcccaagtagctaggattacaggcacctgccaccacacccagctaactttttgtattttcagtagagacagggtttcactatgttggccaggctggtctcgaagtcctgacctcatgatctgccctcctcggcctcccaaagtgttgcgattgcaggcgtgagccactgtgcccagcctggtaaattatttttaaaccacatttactaaaatgataaataagaaataagacataaaaagaaataattgtttgattattagtgtcatttcatttgtatgaatgaccaagaactagccatgtggctgggcatggtggctcacacctataatcccaacactttgggaggccgaggcaggtggatcacctgaggtcaggagttcaagaccagcacagccaacattgtaaaaccccgtctctattaaaaatacaaaaattagctgggcctggtggtgggttactttaatcccagctactcaggaggctgaggcaggagaatcgcttgaacctgggaggcagaggttgcagtgagccaagattgcacccctgcactccaacctgggtgacagctcgagattctgtctcaaaaaaaaaagaaaaaagaaaaaaaaaggaaccagccatgtgtattttatactcaaaatgggtctgctctgacagcttgatacaatagggtggaggatacagttgttgaaaagtttaattcccgcccttcagcatagtaatttataatctaggtcaaagacaaatattctctaaactcaccgttggtgaaggtagatggaggcatggggtttgagaaaaggaagattttgttcctcatttctaatccggcaggcctgagaaggtcttgatacatagttccctgactaaagaaagccatcatggtggagaagttccttgggaaatggatatgacttggggtgtttgctcagtcagatatctgagacctaaacagaaatggtactgagcaataactcagtaggactcaaaagttccaaggcagttggtaaatgacagttatgaataaagcaagggcagaaaaaaacatgtaggggagagaatgaggaactaggtccaggagatgctgaaactggataataaagacgtcatatcacaccccttggggtatccatctgagagcttgctttccattgccagcatgctggacagcagtgacagctccagtcagccccactggagcaacgagctcatagcggaacagctacagcagcaagtctctcagctgcaggatcagctggatgctgagctggaggacaagagaaaagttttacttgagctgtccagggagaaaggtaggctggaccttgaagagctctctcaaatgtggcatcctctacctctggtttgggagaagataacttgagccatcatttctttaatcccctcacttgatcctattcttttgtgggttgtaggtaactagaatgagaacactagcaatagatcagatctacaatcaggaaaacatgacacttacctacctctcatgtatactttttcctatataatgtctttccatttgagaagatgctagtttttgtttgtttgtttgtttgtttgtttttgaggtggagtttcgctcttgttgctcaggctcgagtgcaatggcacgatttcagctcactgcaaccttcacctcccaggtacaagcgattctcctatctcagcctcccaagtagctcggattacaagcatgcactaccacgcctggctatttttttttttttgtatttagtagagatggggttttaccatgttagttaggctggtcgtgaactcctgacctcagatgatccaccagcctcagcttcccaaagtgctgggattacaggcgtgcgccactgtgcccgacctgccagtttttaatttattatgttttttaaacgttcagtttattgaaagttttcttttgtttggtttggtttggttttgtttctgagagagtctcactctgtcacccaggctggagtacagtgatgcgatctgggctcacttcaacctctgcctcccaggttcaagagattctcctgcctcagcctcccgagttgctgggattgcaggtgcccaccaccacacccaactaattttttgtatattttagtagagacgagggttcactatgttggccaggctggtctgaaactaacctcaagtgatccacccgcctcagcctcccaaagtgctgggattacaggtgaaagccactacacctggctgaaagtattgaaagtgaatttctttgtcttttatccttctcatcattttagaggtaactggaatacttttttttttttttgccatccaattcttgaaattgagtagcaaattactattcttggttaccactgccagttcacccccgtcttaactcttggatctcaggagataggtatttggaacatttttaaatactgtcaaaaagaccttcatcttactactttttcctagcctggaccttaatatttagttttatcaaatttatatctcatcaagttttagtgtattcaaatagggaacggaaggaaaagaaatgtgtgaaatcaagaaaaatagaggcaagaaccatgtttaggagcacatgccaattagtatgtttgaagcacaaatgaagtcttgtaaggaccttcagggcaatctaatttaatcccttctctaatgcatgatggaaatgatctgctcactaaacaccgattacctttattccctgaaaaacacacacacagcctggtgtggtggctcatgcctgtaatcccagcacattgggaggccgaggccagcagatcacatgaggccaggagtttcagaccagcctggccaacatggtgaaaccccatctttactaaaaacacgaaaattagccagtcgtagtgtcgtgcgcctgtaataccagctactcaggaggctgaggcacaagaatcgttgaaccctggaggcataggttgcagggagccaagatcgcaccactgcactccatcctgagtgatggagtaagactgtctaaagagaaaaacacacacacacacattggaacacagaaatgcccatcctccatccaggccagggtgggtgtgaagatgggtgccacagagagctagtaacctagaagtcagaatggagtgggggtggagttggtgagatactggtttcgatgctgctgtcaaaaagtttggattaccctagtcaagtgattccctttctgttttgtgttgttattgttattccactttccactctaccattctgcaggtgtcttttgttttcggagtgcaagtagtatcacctcagtttactgagtcaataagctagagtcctcctctgtagaaataatagagaattgcttctcaaatttataacattaattaaaccttagtgggaagattaaattcacacttgatccaactctgaccatggtgataaataactacagaatttcacatttctggattatttttccccagcccaaaatgaggatctgaagcttgaagtcaccaacatacttcagaagcataaacaggaagtagagctcctccaaaatgcagccacaatttcccaacctcctgacaggcaatctgaaccagccactcacccagctgtattgcaagagaacactcagatcgaggtaagagcctctttaaacaaactagtccactctgcagagagatctctggcaaatatctctagggaagatgatgagattagaaaactaactaaataatattttgtcctgactgaggacactctttttttttttgagacagagtctcgctgtcgcccaggctggagtgcagtggcgcgatctcggctcactgcaggctccgccccctggggttcacgccgttctcctgcctcagccttccgagtagctgggactacaggcacccgccacctcgcccggttaatttttttgtatttttagtagagacggggtttcaccgtgttagccaggatggtctcgatctcctgacctcgtgatccgcccacctcggcctcccaaagtgctgggattacaggcgtaagccaccgcgcccggcccactctttttttttttttttttttttgagatggagttttgctcttgtttcccaggctggagtgcaatggcgcgatctcggctcactacagtctttgcctcccaggtttaagcaattctccttcctcagcctcccgagtagctgggattacaggtgcttgccaccacagccggctaattttttgtatttttagtagagacagggtttcgccattttggccaggctggtctcgaactcctgacctctggtgatccgcccaactcagcctcccaaagtgctgggattacaggcacgtgccactgtgccctgcttgaggacactttttggaaaactgtgagaaggcagagcgtagagaacttcatgagctccacccatttcttccactctttgcagctcataaaatttagaatctttttcagatgaggacttgaaaagatctgtggaagagcaaacagccattagtggctgtatcatctcccttcactgctgctactgaacatgagaactaggggaaagagcacttgtgaagtcatacaggtccttgtttacattttggagtagtttctgctgctggcattttactactaccaacaactgttttatggagaatcattattactttacctgtcatatttatactcccttttaccaatgcgtttccctctacagccaagtgaacccaaaaaccaagaagaaaagaaactgtcccaggtgctaaatgagttgcaagtatcacacgcagagaccacattggaactagaaaagaccagggacatgcttattctgcagcgcaaaatcaacgtgtgttatcaggtgcaaggaaagatggtacaggaaggggatggataacaggaacgtgggaaccactcacaggactgggaatgaagcaagacctaagtttccagggctgataccaggtgatgtgctatcctgagcaaacacacaatggctgtcctttgaagaacttgaggactcacacatgcccacggcaccttggcactaggagccagtgatggggccagcccatgccaatggcaagcgtaaggcttctgggttcaaattttgccagtcctaggaaccaccctacctcaatgatagcacaactagtcttggaggggtctgcaaggaaatcaaaccttcttctagtgggtgaacctgcccagctaaggatagcagtcttcttgacctagccagtgccacattttttatgctctttggttttaggccactgagatagaaaagttcagacattattttgtttcaggaggaactggaggcaatgatgacaaaagctgacaatgataatagagatcacaaagaaaagctggagaggttgactcgactactagacctcaagaataaccgtatcaagcagctggaaggtattttaagaagccatgaccttccaacatctggcaagtcttagtcctttgttctcctcacttcgggacccttccacagctaacgcctgtgttccactctgtgtacttgtcaagaagggtgcctctcatacccttagcatatgacttatccttcttgttctttatcctatcatttttgttgtttttttttgcttgtttgcttttgagatggagtcttgctctgtcactcaggctggagtgcagtggtgcgatcttggctcactgcaacctctgccttccaggttcaagcgattctcctgcctcagcctcccaagtagctgggatgacagttgtccaccaccatgcctggctaattttttgtatttttagtagagatggggtttcaccatgttggccaggttggtctggaacttctgacctcaggtgatccacctgcctcagcctcccaaagtgatgggattacaggtgcgagccactgcgcccggcccatctttgttgttttaatacatgttagcagcttctttccctccatcatgtttttctgatttctctgtagagtttcaagtgggcccagcaattgcttccaggggcttaattctgttgtgagaatgagtatcactgttggctctcagggtggtggtgtaacacacaatctctctctctctctctcattctttctctcttgctcctctcccctgtccctctctcctagtcactgtttcctcaaagcagttttagtcggataatagaacttcatcactcatctcctgttattcttgtcagtgatttctctcttaaaagctctaaaatctttgttgcaatttgaggatgctgacagtgacagggcagctggctggacactgaatgcaagtttcatattgtggtgcctcctatacttagtgtagtcactgctgaccagagcctggtctcaggcttgtttgtcaagacacttggctttgttattatacccagtggtgaaagatctgactcacgaaaaccaaattaaccagaagctgatatttaaacccaaatgtttgttattttacaatagtggctattccactgcttccatgaggaacttggaaccacagttcagggcagccctctttcgggaagcaaaatcagtaagtaggtttcttagtgagcatggaatagaataaagggacatggctgggcacggtggctcacacctgtaatcccagcactttgggaggacgaggcgggcggattgcctgaggtcaggagttcgagaccagcctgaccaacatggtgaaaccccatcgctactaaaaatagaacaattagctgggcatggtggcgggcacctgtaaccccagatacttaggaggctgagacaggagaatcgcttgaacccgggaggcaaagttgcagtgagccgagaccaggccattgcattccagcctaggcaacaagagcgaaactctgtctcaaaaagaaaaaaaaaaaagaataaaagcacataagtgtctctgggccgtgatttatccatgtcagcgtgagtctgataaaagatcactgcttctacctacgtctgaagatttatttgctttagctaatagttctttgatcactggtaagactaaagagtttttctatgttcaccagttatttgtattattccttttgagaattgaccgttcctatcctttgcctacttcttaacagtatcctattgatttatagaaattctttttatgctgagattattactcctgcatcatgtaatgcaaaattttaagtatattatatttaattatattaatcttgttaattaagaaagtagtctccttattcgtgtgtgtgtgtgtgtgtcatgaagacattccgatgtgtccagaatattttattctactgctttaactcttaaaataggaccttcggcagcagcacactgtgttgactcaaatattccccaatttgaagcaggctatatatcaaagtttctgattggttggacttgggagataatacccagatttgctagactgtctacctatctttgcgtcccactgccaatatttcctacctctttccagtaagtctcttttcccactttttactccattactctttaacttataatgtactttttgccttcttatgttgaaaccaaattctgaacagaatgaaagatctcctgactgacctggctagagaaggagaagcatttcttggtgggactcaatgtaatgtcatagacactatgtctgcaacttgctattatctccacggccaatataccaaacttgtagaaatattcatgtttttgtgtttctagtacttctcttatggaattaccagttaatcatagggccacgatgtacaccaaaacaatgtcatatataagataaaatgtgcccccagtgttttcctaagtttagcatctactttccagtcactccttttgtaccttctccctaaagctggcattggattatttggctatcggaattcaatgctcctggttgtccttctgttgcttttccttttgaatcacgtggtttcttgaaataatcacaacttggacttccaccatgtgttttatatttcttttgtccaccctcctctaccctaagaaagagctccctaccctttaacggataggcagctttctttcccctctagaacagctcaaagatgttgcttatggcacccgaccgttgtcgttatgtttggaaacactgccagcccatggagatgaggataaagtggatatttctctgctgcatcagggtgagaatctttttgaactgcacatccaccaggccttcctgacatctgccgccctagctcaggctggagatacccaacctaccactttctgcacctattccttctatgactttgaaacccactgtaccccattatctgtggggccacagcccctctatgacttcacctcccagtatgtgatggagacagattcgcttttcttacactaccttcaagaggcttcagcccggcttgacatacaccaggccatggccagtgaacacagcactcttgctgcaggatggatttgctttgacagggtgctagagactgtggagaaagtccatggcttggccacactgattggtaagtgccgttggcttcctgcggctcctaagcaccaatgcagaatttcccaaagcctacagttgcttttctggtggtttcttattttcttcctttgtcttgttcttgatccttgccacaccatctgtattccccctgctttcacactttctgctacccaggagctggtggagaagagttcggggttctagagtactggatgaggctgcgtttccccataaaacccagcctacaggcgtgcaataaacgaaagaaagcccaggtctacctgtcaaccgatgtgcttggaggccggaaggcccaggaagaggaggtgagaaaaaagatgtgccgaggcatctcagaggagcctcagccaaacagctcatgagcacagttcagtcttccactctcaataagtgtttgttgaatgtgaatgaaagagaaaactgtcacaccacaactagtctggattattcccttggtcaggcttgagtctgaaatgaaagtatgcctttggagcgagctacatccttcatccttgctgtgaacagaatagcttctctgtgccattctctaagttaagtcgtgagtgccagtatctccctgaaataactgccagagccagtttgcaggcaggtgaagatcattaggtttcttcctgatccagttgggatagctgttctctagatcatagctcttcctcaccacagatcctaggcttcacctacaacagtctcaagctgcccttttcctcaatccatgaccaacatctttccagttcagatcggagtcttgggaacctcagaacgagctgtggattgaaatcaccaagtgctgtggcctccggagtcgatggctgggaactcaacccagtccatatgctgtgtaccgcttcttcaccttttctgaccatgacactgccatcattccagccagtaacaacccctactttagagaccaggctcgattcccagtgcttgtgacctctgacctggaccattatctgagacgggaggccttgtctatacatgtttttgatgatgaagacttagagcctggctcgtatcttggccgagcccgagtgcctttactgcctcttgcaaaaaatgaatctatcaaaggtgggagttcgaggttattacatcttcacgccctcttcccagtgttgtctccctgtcctgattctacttttctttgattacttgcttgaaacagtctctcttaaaacctgaagataaaggatttagaatattgtcaagagcaacagagcagaagacttagagcctcactacttgtgtggaaacactggcttcttctgcttcttttcagccacaaagacaacattcctaagtgggtagagccagcaacctgaattctatacctctgtatctgaataaacttctttgttttttgagatggagtttcgctcttgttgcccaggctagtagctgggattacagacatgcgccaccacacccggctaatttttgtatttttagtagagatgggatttctccatgttggtcaggctggtcttcaactcccgacctcaggtgaacctcccacctgagcctcccaaagtgctgggattacagacgtgagccaccgcgcctggctgaacaaactttttcaagctctgtaatgctgtctagtatctgtctttactaaaggcctgttgtttcttagtgcatgactacatagatatctgattataaactgagaccttaacactcccccatcattctctcacttcttttaaacactggacacaagttagagagatttccacaccagatcatgacaaacacaaatttcttggattttttttttcctcccaatgtggagctgagctccatactgtctttcctaacttttatacctaggattgtgggggtgtaccaagaggggtcaactctttgactacagtcctgggagggtgaggtgggggtatccatgttttccttaggaagtggggatagctgcagtcagaaacaaccatatttaacaagattctggatgctccaggacatgtatgcagctctctcctcaatacaactgcttaaaaaaaggctgacacttctggacacaactcctttgccaaacaggggaggcagtataagccacctgttaatcagtgttacaaatcagacatctggcatttcgaaagagccattttgcttaagttttcttgggaccacttgagggtagaggtaacagttttcttggtacaactaaggcacagtaagcatttgataatagtaataataatgcagccttgttcattggctggatgactgatgacaagcaagctgtactccttttcatacacccttcactatctcttcctgaatcctagagataacccatcttccctgattaatattctaactgcactgctgtttgattttacttctgagtgtatcatcatcgtaattatttaatggatgttaattaattgctgataaaatatgttgaaattaaaaatgggaaggaagtagataaggtgctgacaaatgctcacttgcttatttcatgtgatcaggtcttattaatatctgtttgtttctcaggtgattttaacctcactgaccctgcagagaaacccaacggatctattcaagtgcaactggattggaagtttccctacataccccctgagagcttcctgaaaccagaagctcagactaaggggaaggataccaaggacagttcaaagatctcatctgaagaggaaaaggcttcatttccttcccaggtaactctccaggactccacaggtagcagatctctgccaatcctatggagcagatttgaaggagacagtattatagttgaagtaggtgcagtggctcacgcctgtaatcccagcactttgggaggccatggcaggcgaattacctgaggtcaggagttcaagaccagcctgaccaacatggggaaaccctgcctctactaaaaatacaaaaaattagctgggcgtggtggcacatgcctgtaatcccagctactgggaggctgaggcaggagaatcacttgaacctaggaggtggaggttgcggcgagccgagatcacgccattgcactctggcctgggcaacaagagcagaactctgtctcaaaaaaaaaaagaaaaagaaattccctctgtgagtgtcatgtgtcctgtgaacttaatatatatccctcataatgccatgagactactgatggagcgaaagcctgggttttactgcggaaaagagagagaaatagcatttctcagctccatgaggagagaaatgaagtctaacactagttcccaaatccctttcttgtgtttctaggttgttaaactaccagcttgtaatgctatctctgatctttctattcaggatcagatggcatctcctgaggttcccattgaagctggccagtatcgatctaagagaaaacctcctcatgggggagaaagaaaggagaaggagcaccaggttgtgagctactcaagaagaaaacatggcaaaagaataggtgttcaaggaaagaatagaatggagtatcttagccttaacatcttaaatggaaatacaccagaggtaagaccttaaaaactctgaagcactaaattgtgggttgtagtgtccccagatgtattattctcagaggtagaagcagaagcagaagcagacacacaagataagcactaatcggccgggcatggtggcttcggcctgtaatcccagcactttgggcagttgaggtgggcagatcacctcaggtcagcctggccaacacggtgaactcctatctctgctaaaaatacaaaatgaggcctggtgcagtggctcacgcctgtaatcccaacactttgggaggccgaggtgggtggatcacctgaggtcaggagttcgagaccagcttgaccaacatggtgaaaccctgtctctactaaaaatacaaaaattagccaggcatggtggtgtgtgcctgtaatcccagttactcgggaggctgaggaaggagaatcacctgaagctgggaggtggaggttgtggtgagctaagatcgcgccattgcactccagcctgagcaacaagtgagaaactccatctcaccaaaaaaaaaaaaaaaaaattagccaggcatggtggtatgtgcctgtaatcccagctactcagtcgggaggctgaggtaggagaatcgcttgaacccaggaggcggaggttgcagtgagctgagatcgtgccactgcattccagcctgggcgacagagcaagactccatctcaaaaaaataaaaataagataagccataatcatagctaattgtggctagcttgtgtttccacaaacacaagtagtttaacaaacccctggactgttcatttcaatgtaatttaattcagcatattatgtactctacagtttatgcttaaagttttaatactatatatatttttaaacaagtactcactttttttttttttttgagaccgagtcttgctctgtcgcccaggccagagtgcaatggcatgacctcggctcactgcaacctccgcctcccaggttcaagcaattctgctgcctcagcctcccaagtagctgggattacaggcacgtgccaccacacccagctaatttttgtatttttagtagagacgaggtttcaccatgttgatcaggctggtctcctgacctcaggtgatccgcctgcctcagcctcccaaagtgctgagattataggcgtgagccaccatgcccggccaacgagtactaacttttaaaaattaaaaagagccagtattgtctgggcatggtgactcacgcctataatcctagcactttgggaggctgaggcatgcggatcacatgaggtcaggagttcgagaccagcctggccaacatggtgaaaccccatctctactaaaaatagaaaaattagtcaggtgtggtgacgggctcctgtaatcccagctactcaggaggctgaggcaggagaattgcttgaacccaggaggcgaaggttgcagtgagccgagatggtgccactgcactctggcctgagtgacagagggagactctgtctcaaaaaaataataataataaaaattaaaaaaataaaaagagctaatatttaaaaagaaggcaggaaggaaggaatgaagaaagaaaaccaagatattaccagctatgtagtattgttgttcttattctgaagcaggtgaattacactgagtggaagttctcagagactaacagcttcataggtgatggctttaaaaatcagcacgaggaagaggaaatgacattatcccattcagcactgaaacagaaggaacctctacatcctgtaaatggtattgtcttttaaaatctattttttttcctagcactttgggaggccgaggtgggcagatcacgagatcaggctttcaagagcagcctggccaacatgatgaaacccgtctctactaaaaatacaaaaattagccgggtatggtggcaggcgcctgtaatcccagctacgtgggcggcggaggcaggagaattgcttgaacccaggaggaggaggttgcagtgagccgagattgcaccactgcactcctccagcctgggcgacagagcgagactccatctcaaaaaaaagaaaaaaatatatattttttctgtttaatcatttaattgttttgccaagctagttatttacttttctccttcaccttagaatgctaaagttttcatggaaaattagtatgtaagacctgaggcccagttttgtgttacaagtgtgatggttgggttaaccaaggctggaattcttaaataagtaactttctcagtgtttataaaatgttattttgccccaggatttttttgttttgttttgttttgtttttgagatggagtctcattctgtctcccaggctggagtgcaatggcaggatctcagctcactgcaagctctgcctcctgggttcaagcaattctcctgcctcagcctcccgagtagctgggattacaggtatgtgccaccatccccggctaattttgtatttttagtagagacaggttttctccatgttggtcaggctggtctcaaacttctgaccttaggtgatccgcccacctcagcctcccaaagtgctgggattacaggcgtgagccactgcacccgacctagttttgattttctcattaaaactgtttgttggctggttgtggtggctcatacctgtaatcccagcactttgggaggcatgggcgggtagatcacctgaggtcgggagtttgagaccagcctgaccaacatgatgaaaccccatctactaaaaatacaaaaaattagctgggcatggtggcatctgcctgtagtcccagctactggggaggctgaggcaggagaattgcttaaacccaggaggcagaggttgcagtgagctgagattataccactgcactccagcctgggcaacagagcaagactccgtctcagtacaaaaaacaaaaaacaggacagtgtttgtcttgattattgagtttttggcaccccttcaaattttatgcctaaggtcagtgcctcacatgccttcctctacttctgacagtggtcagaatagtggttactgctaggagaaggggaagagggttatcaggaaaggacaccctttgggcatctggagtgctaccagtgttctatttcttggctgaacggtgatagagatgttcattttacaacaatttaataagttgaacatttatatttcatgggcttttctatgtgcttgaaaaatttaataatgagaggaaaaatataaaggtagatatggaaatattatgaaaagagagtctttactacttaaaaaagctttttttctaaatctctagaagcattttatatatatataattttttttttttttttttttgagatgaagtctctctctgtcacccaggctggagtgcagtggcacaatctcggctcactgcaatctctgcctcccaggttcaagcgattctcctgcctcagcctccagagtagctgggactacaggtgtgccccactatgcccggctaatatttgtatttttagtagagactggatttcatcatgttgtccaggctggtctcgaactcttgacctcaagtgatccacctgcctcagcctcccaaagtgctgggattacaggtgtgagccaccacgcttggcctaaaagtataatttttaagcttttgaatgtatttggcataacttcttaaatgggaagagcataaatgatttttctcatgagaaggataatttttctattgattatgtaatctgatttctccgtcaaagtttactcaatgtaaggaaggttaacaagaataaccaagcccaaaatttcccagagccaaatttacatgactggcaagaaatcctggttataagagaacaattccattcttatgatttgcagacaatggaatattatttagtcataaaatagtagaataaatagtaacagtgtatctagatagcttcagtgtatccagacctgaatgcggggttccagttatctccatactcccaatttacatttcttcaggtatttgattgagtataatctatatccactagctttttctccttgtagaatgtgaaatatgggaccagaaggtaatctaaacctcatgtactatatggtcatctatttatagtcataaataataaaagaagactatttctgtggaagcctaattgttagttattgttttaatatcgctgttctccatgaatttcaaaagatcaagactggccaggcgcagtggcttacacctgtactcccagcagtttgggaggcagaggcaggcagatcacctgtcaggagcttgagactagcctggccaacatggtaaaaccccgcctctactaaaaatgcaaaaattagccaggtgtggtggtgggtgctggtaaccccatctgagaagctgaggcaggagaatcgcttgaacctgggaggcagaagttgcagtgagctgagaccatgccattgcactccagcctgggcaacaagagcaatgcttcatttcaaaacaaaaacaaaacaaaaacctcaaaagcaccagttagtactcgcaagaagctaaaatctgcctggtttcagatgtctgagtggagctatcaagcaggatgctgtagttgttgaaaaagaagcttattaatcttttagacaaagatctaagggtattaggtaaaggccatcaagaaatgaaaagggcctgattttaaggccatttccacatatgtagacaaagccttgtgtcttttagcagcctttgcttttgctgcccgctcagaccttttccctttgagacctcagtgaaacagacaacccaagactttgaaattttacagaagaggcacagcttgccatccagttatctaatgctatgtaacaatctactccaaaacttaatgacttaaaacaattgtcatttctttggctcactactcggcatgttaggcaggtctcatgaagaaggctcatttctcctctctcaatgtggcattagatggggtagctcagctagggggctgatgggttcatcttgcaagatagctcaccctactagctgatcaggtggtcctggctgtcagtggttgcttgggcttcctcacaggttggtagctgagttccaagacagcaaggtacaagtccatggcatttttgtgttctggccttagaagtcacatagcatcactcctaccgtactctttcagttgagacagtccaaaagatccaccttaattgaaggggaggggacaaagaccccaccactcaataggagcagcgtcaaggtcagtcgcattgtaaggagagcagctgagataggagagaccatttgaggccacctttttttttttttttttttgagacagagtctcttgtcgcccaggctggagtgcagtggctcgatcttggctcactgaaacctctgcctcccggattcaagcaactctcctgcctcagcctcccgagtggctgggaccacaggagtgtgccaccaagccaggctaattttgcatttttagtagagacggggcttcaccatgttggccaggctggtctaaaactcctgacctcaggtgatccacctgcctcgaactccaaaagtgctgggattacaggtgtgagccaccacgcccagccagagaggccatctttggaaaatacaatctgccccacccaattgcacagctttacctcaagcttggccattttcttcagcccccacaaaaggacttcctttcttccttccttactctcacccttccttcctgtcttccttcctttcttcctttctgtttttccttctttccctttctttttttgagaagtgaatcctgtatgtttggcaagcttctgaataagtgtacctttgaaaaagagggtttgattcttagtaagtgaaggcaaaatctagacactcggaactagtgaccagacagtggattggagatgtgtgtgctgggtcttttcttgggctaaagtgctttgaaacagttctataactgcaacctcttctctagcagacaaagaatcctctgaacaaggttctgaagtcagtgaagcacaaactaccgacagtgatgatgtcatagtgccacccatgtctcagaaatatcctaaggcagtaagtacactggagtaatcattgcatacgagataagacgataaataatgacagtggccagtcatgggggctcacgcctgtaatcccagcaccttgggaggccgaggcaggcagatcacctaaggtcgggagttcgagaccagcctgaccaacatggagaaaccccatctctactaaaaatacaaaaaaaattagccaggcatggtggagcgtccttgtaatcccagctactcaggaggctgaggcaggagaattgcttgaacccgggaggcagaggttgcagtgagccaagatcacgccattgcactccggcctgggcaacaagagcaaaactctgtctcaaaaaaaaaaaaaaaaaaaaaaaaagcaataatgacagtgtgcttagtggccacacaagtgaagggcaatccagttttaatgaagctgatggaaaatgcaaattgtttagttaaatttatgtttcgtgtgaatgaaggtcggctggtacagtcagataaaaggatcattttcttgagatagtgtaaatgatgacttgcttcaatacttctgtcctatctggatcctttgcctcttactcccatatcctccattgtgtcctgtaattcatgcccagcctgaatggtacccctgcctttaagtccatctaaggaaaacgggtttgctttgggagatggagtctggaagagaggacaggattcttcatgggagggctcatggagatcattccatttctgctgttttttactcaacctgtaattatctattaaacagttcagcctcaaagctctttcagaactgatttaagagacacgcatcaaaaaaatataaaaaagaaaaaaaagccggttgcggtggctcacgcctgtaatcccagcgctttgggaggccgagacgggtggatcacgaggtcaggagatcgagaccatcctggctaacacggtgaaaccccgtctctactaaaaatacaaaaaaattagccgggcgtggtggctggcacctgtagtcccagctactcgggaggctgaggcaggagaatggcgtgaacccaggaggcagagcttgcactccagcctgggcgacagagcgagactacgtctcaaaaaaaagagacacacatatattaataaatatccacacatatattcagtaatcattgtgttctaaccttgtgggttacacatgaggtagaaaacaattactcttaagtcgctgctgcctgacacatttgtaggtcctcaatatttgttgagtgagtgactgaataatagattcagagtgaattgatgattatgaacttcattagaaacattaaataagaatgtaggatgacctaaaaccaaggaggtagattgtgtaatataaagtctgttgtaagaaatcagaaaagggaatttatggtttcttttgtagaggttggaaaactcttccttgaaagctggaacatgtgcttgagaactgcaggaaaatgaaggatattggagtgaggagaaaaaactcaaagtcagtagacttaaacactgaatataacacatagttcaatttcagctgaggtgtggtggctcacacttgtaatcccagcactttgggaaactgaggcaggcagattgcttgaggccaggaatcaagaccagcctgagcaacacagcaagacaactgtctctacataaaatttaaaaactagctaggcgtgttggctcacatctgaagtcctaagtatttgggaggctgaggtgagaggattgcttgagcctgagagtttgaggctgcagtgagccatgatcttgccactgcactctagcttaggtgacagagagagaccctgtctcaaaaacaacagcaacgacaaaaccagttaagtttctctttgtctgaacttttatctatcatatctttttttagatattatgtagttatctgacaagtgtttgtaagacagactggagccacagaatgttggaattagataacacttctatattaccaaggtaaagaagattaaatgatgtgtacaggattattgagttagtgaaagagctgaaactccagttgaggtttttaaactgcgcaacctctcaagtaaccaaaaaaagcagccagctgatcagcaaactcatcttgaactgtaacaagccagccagatttcattaaaaacattacctaaattaaaggctcctaagtaagatatccttttagaaaacttccttgtgtgccccaaagtgttacttgagaaattaaatatgagaaaggagcctatctaagcaaaaaattagtgttattatcaagttaaacgtacaacacaggcacatatatattaaattattgttatattccaaaatgtccaggcatgaaaggtagagggggttgaaagctcagagtcaaaacttgagttctgtcactcttctgcctggggtcagctgggataaatggaaatgcagtagagtgtaatgtttaagagcatggagatttggttgagacagtgatttagatcccagctctgctacttaactagatatacagctttgagagagttttttaacctctattaggccttgtctccttatctgtaaaatggtagtattaagtatacccatctgatactgatgtggcaagattaaaataagggtttaatacagtgcccgagacaaattaagccctaaatgatagtgaggatgagtgtgatgataatagtagtctcatttctctgacctactggagttctcaatgttaagctttttttttttttttttgagatagagtcttgttctgttgcccaggctggagtgcgtgcagtggcgcaatctcggcttactgcaacctctgcctcccaggttcaagagattctcctgccacaggctcccgagtagctgggaccacaggtgtgtgtcaccacgaccagctaatttttgtatttttagtagagacggagtttcactatgttggccaggctggtctcaaactcctgacctcaggtgatccacccacctcggcctcccaaagtgctggaatttacaggtatgagccactgcgcccggcctaggttaagcatttttttttttttttttttttttttagagtctcgctctgtcacccaggctggagtgcagtggcaccatcttggctaactgcaacctccgcctcccgggttcaagcgactctcctgcctcagcttcccaagtagctgggactacagacacacgctgtcacgtccagctaatttttttgttttgagacctagtcttgctctgtcacccaggctagagtgcagtggtgcgatatcggctcactgcaacctccgccccccaggttcaagcaattctcctgtctcaccctcccgagtagctgggactacaggcgcacgccaccatgcctggctaattttttgtatttttagtagagatggggtttcaccgtgttagccaggatggtctcaatctcctgacctcgtgatctgcccgcctcggcctcccaaagtgccgggattacaggcgtgagccaccgctcctggcctccctcttcttaacagttactaatgaggagggagcaatcattttcatttgctctatggtcccagattactgtttctttagcaatagtgaatatcgagaacctcaaaattttttctcttatcgtgtcaatttcaggtgtcaggaatttcctgacccttatgtatgccaggtagtaagttttggcagccctgccccccagccaaattaggtggcacatctgagctaataagccaaagggtgttatctggcactaatccttgcagggtttctgccagcaagttcaaatgagttgatatatatttcaatggttaatattactaattgcatactttctttgctgttcagccccaataaaattacataatggaattagctcatgtaaagaaagtattctgaatccaacaaaaaatattagattgaaccatatattgtcatactcatagataaaaaatggttgacaattgtcagttctgtatagtccaacctaatatgaatgaataaaacatctgtgtgtacttggatcaaattttaatcttattcatcctcccatttcaccattgttaccagaataaacttgatgtagtctgcatgaatatggacttctgattattgtcccaggattattagcaagtttaaaaaatttgctgggtgtggtggctcacgcctgtaatcccagcactttgggaggtcgaggcgggcggatcacctgaggtcaggagttcgagacaagcctggccaacatggtgaaaccctgtctacaaaaatacaaaaattagccgggcgtgatgacgggtgcctgtaatcccagctactcaggaggttgaggcaggagaatcgcttgagcccaggaggtggaggttgcagtgagccaagattgcaccactgcactccagcctgggcgacagagcaagactctatctcaaaaaattgttttgttttgtttttttaactaggcaggtgtggtggctcacgcctgtaattctagcactttgggaggccgaggtgggctgatcatgaggtcaggagatcgagtccatcctggccaacatggtgaaaccccgtctctactaaaaatacaaaaattagctgggcgtggtggcgcgtgcttgtaatcctggctactcgaaaggcggagaaaggagaatggtttgaaccaaggagtcggaggttgcagtgagccgagatggttcccctgcactccagcctggtgacagagcgaaactcggtctcaaaaagaaaaaaaagaaaaataattttagatgtacaggaaggtgctatgtaatgtttatttagttttactcttttttcttcttttttggtaatgttatgaaacatgtatttttcaatcaataatgttttggggttctatccatgtcgatatatttagctttttatagttccttcgtcttaactgctgatcgatattgcattaaaataatacatgacctttcgtttagacagaactctaatgggtaatgattgagatttcatactgtgtgccaagtgcttgatattcatgactctctcgggcttcacagcagccttatgagttattctttccttcaagtaattatgaagtgcctgttttagtaactgccgggctctgtgggcacaaaatggtggataagacagacttggtctcttctctcttgaatcttacatactactgagggaaaatatgtacatcagtgagcaaataagtaaagcagatagctctgagattctaagtactatgaaggaaataaatagggcgatataatagcaatgcgaggagttgaactaggataggtgttgaggaaagatttctctgaggaggggacgtttgaactgaaatctgaagaacgagaagggaagagctacccatgtactgggtagactgtactcatctcaggcaaaggaattggtaagtgtaaaggccctgaggtaggaaagagtttgatttacctgaggagtgggaaatcaaaagaaaattaaagtttctcttgcacacatgtatattattattcccccaccccctttcaaaggaggacagtgaagtctagggagaagagcttgctcaagggaatatttaatacagttttactgagtgtatactgtgtgccagacattatgccaggcattgtgccaggcactagatactcggtagagactttaatggggccgggcgcaatggctcacgcctgtagtcccaacactttgggaggccgaggtgggtggatcacttgaggccaggagttcgagaccagcctgggcaacatggtgaaaccccgtctctactgaaaatataaaaattagtcgggcatggtggcacatgcctgtagtcccagctactcaggaggctggggcaggagaatcgcttgaacctgggagtcagaggttgcagtgagccgacgtcgcaccgttgcactccagcctgggcaacagtgctagactccatctctaaataaataaatacagattcccaggagccactctagacagtctgatataacacagaggcttttatacattttttatagcaatcactatgagaaatacatttctgcagtatccaatactcttataaaagaacaagtttcaagaaaccaggcttactattaacatttgccatgcattctcctattccactagatagtgtcttatcctgtctatcctatcctattgtttcttttttaaaaagctagtgaaacccgctaatctgacccatcaaagtgtcaaaaaaaaaccagatttttcaaaacactgtatagtcaatagttttcttgatgtttgggagagttggatgttatgggagggttattaagagaaaaacatcaaatatcgtttttttgtttgtttgtttgttttttgagacccagtctcactctgttgcccaggctggagtgcagtggcactgcaacctccacctcctaggttcaagtgattctcatgtcagcctcccgagtagctgggattacaggcatgagccaccatgcctggctaatttttgtatttttaatagagatgcggtttcaccatgttggccaggctggttttgaactcctgacctcaggtcaactgcccgcctcggcctcccaaaatgctggtattacaggtgtgagcctctgcaccccgccaaatatcttcatttttaagaagcaccccagatgattctgatgcagaatcattgagagatcttgcctgctgaatttcttaggggcaggcacaggagctccacttgctttctaagagaagaaaagatggggtaagagccggtctttggagaagtaagggcattggcctggccagctagtgaaaagaagcatacaggagggcactcacagatagaggggagagcgctatggctggtagggaaccatcctggattgactcattactggtgtcacgatactgacttgcctgccacactgtggaaggaggagacttctgttggccttggtgtacttctggaaacttcctcctggtatccctgatgccaacatggacacagggacaattaaaagaaaggacagggtgatggcagcgactgtgaagtgggattgaaaatattggagttcctggccaggcgcggcggctcacgactgtaatcccagcactttgggaggccgaggcgggtggatcacgaggtcaggagatcgagaccatcctggctaactaaaccccgtctctactaaaaatacaaaaaattagccgggtgtggtggcgggtgcctgtagtcccagctactcgggaggctgaggcaggagaatggcgggaacccgggaagaagagcttgctgtgagccgagatcgtgccactgcactccagcctgggcgacagagggagacactgtctcaaaaaaaaaaaaaaagactggagttcctgtgggagggcagggtggtctggtggcctcctcagtggcatgcacttgagtgggcatgggaagccctgggcagctctttgctatagtggctgaagcagctactgaatctccagtatcagtcaggaggtcttttaggtcctaacctcaggaaaatactagcttggttttcatgaagaacactgtggccagttgcagtggttcatgcctctcatctcagccactttgggaggctgaggtggacagattgcttgagtccaggagttctagaccatcgtgggcaacatagcaagaccatatctctattaaaaaaataaaaataattgtccctatgtggtggtgtacctgtggtcctagctacttgggtgactaaggtgggaagactgcttgagatcaggatgtcaaagctgcagtgaaccatgatcacacaactgccctccagcctgggcaacaaagcaagactctgtctcaaaaaaaaaaaaaaaagttgagaaatagctgtttagaaatttatttatttgtatataatcatcgggtacaagcacagttttgctgcatttatatattccactgtggtgaagcctggagcgacgcacattgttcccaccaagcaacctcccatcatccaccctccccgccgctccgaatcagacatttttttttattctttctatatgtggagatgactgagaaaggctgtcctggagaaatgatccactggactgtgagagagaagagctgggttctctttataaatttcctatcaattaactatggcaattaagtcaagttgtcttttgatgccagttttacctataaaaggattctcagggaataatatagtagatagattatacctatggttgatttctagagagtaccgtaatgggttaattggatggcgtataagcacttggagcctcactaacctttaggaactaaataaacattttccttatcaggattcagagaagatgtgcattgaaattgtctccctggccttctacccagaggcagaagtgatgtctgatgagaacataaaacaggtgtatgtggagtacaaattctacgacctacccttgtcggagacagagactccagtgtccctaaggaagcctagggcaggagaagaaatccactttcactttagcaagggtgaggcatcctgtgtggttactggggtgaggaagtctgatgaacattgagactgagggtcagaattactctggatttttgtggggtgaatccagccatttcactttattattttattgttcaaagtgttgtgtgcatgtggtttaaaaacatcgaatggggctaaacattttacatgaagcaggcctttgtcccagctcttcacagatcacttcgcctgttcccacccttcctcaatccacggcttcccacatttcagctatatttatttttactttttgaggtggagtctcgctctgttgcccaggctagaatgcagtggtgtgatcttggctcactgccacctctgactccgagattcaagcgattcacgtgactcagcctcccaagtagctgggattgcaggtgtgcgccaccgtgcctggctagttttttgtgtttttagtagaggcggggtttcaccattttggccaggctggtctcaaactcctgacctcaagtgatctgcctgccttggcctcccaaagtgctgggattataggcgtgagccaccaagcccatcctatctcagccatttcttctgttatttacttccatcatatttctgagtattgatttttgttcttcctcttttcctgtttttttttttttttttttttttttttttttttttttttttgagatggagtctgaacatgttgctcaggctggtttcaaactcctggactcaaatgattctcctgcctcagcctcctgagtagctggaattacaggcgtgagccaccatacctggcttctgagtaacatttctattgcaatctcctgattcaccggctttagacttcctatctcggaccttaaaagttagctcttttgcactacactcatgtccctttccttcccatcgtaattgtatcataatttttatttaaatccatttaaattggttctgttattatggatatgtaaatattaattcttgcagaaccaagtagtatgcaatgattatatttctttacacgtattttttgcagcaatttttcattcgccttattttcattatacatattgtaattattttcgtgtccttcaacagtcttcccaaattttgaaataatcaaacctgtcaaattatctactcatctatttttttcctgaagacctctctccatcctcttgttctgctctagcccactgtttcattattactgctgctcatggagaatacgatcaaattctctcctataccagatttcttatctcctggttatcctctaatttattttcttattttaatggatcatattttcagtagtttttaaagaaagggcatatcacaagtgaaaatttgagaaagtcgtgcatgaaatctttttttcctaccctcatatttgattcaagtgtggaaatctttttcattcagaatttcgaaggagcctgggtgcagtggctcatgcctgtaatcccagcactttgggaagccaaggcgggcagattacttgaggtcagaagttggagaccagcctggccaacgtggcaaaaccctgtctctactaaaaatacaaaaattagccgggcatggtggggtgcacctgtaatcccaactactcgggaggctgaggcaggagaatcgcttgaacttgggagatggagactgcggtgaaccaagatcacgccactgcactctagcctgacacagtaagaatctgtcacacacacacacacacaaatgattttcaaagcagttggtccatgttattctagatccaggcaaggagtctaatctttttatgaaaactaccatgaataccactaatgaaagtcttggggctcacactgcaacagtatatgattctttgcttttttctcttacccttaatacagtaatagacctggacccacaggagcagcaaggccgaaggcggtttctgttcgacatgctgaatggacaagatcctgatcaaggacagtaagcatctgctttccactttgaaacaaaggagatattgagacagaaattcaaaagtttgagtttggttttgtgctgatgctgaatattttaataacttttttgagttaatttactcttaatgaatttcctatgtacttgagtataatttatatttgtgactacctaatccattacctaatcttataggttatttatttatttatttatttatttattttcgagacagggtctcactctgtcgtccaggctagagtgcagtggtgcgatcttggctcactgcaacctccacctccccaggctcaagggattcttgtgcctctgcctcccaagtagctagggttataggcatgtgccaccatgcctggctaattttttgtgtttgtagtagagatagggttttgccgtgttgctcatgtctggtcttgaactcctgcgctcaagcgatctgccctcctcggcctcccagagtgctgggattacaggcgtgagccaccgtgtccagcccatagtcttataggtttagttcatttctcacccatgccagcctgatgggccctttttttgtagcagcagtttacttgaatattgacaatgcccaaatggaataacaaaaagtgttgacattcttcttttttttgagacagtgtctcactctgttgtccaggctggagtgcagtggtacaatcttggctcactgcaacctccacctcctgggttcaagcgattcttctgcctgagcctcccaagtagctgggatgacaggtgcacgccacttgcctggctaatttttgtatttttagtagagacagggttttgccatgttggccaggctgatcccaaccccaggtgatccttctgcctcagactcccaaagtgttgggattacaggcgtgagtgaccacacctggtcaacaggaattttttgatgttgacataactaagtgaattttagatctcctttaaagttttaggaaagctggttgtccttattattccaataatctgaagaaggcctcctttcagagtttccagataaaatgtgggacatacccaaaaaaaaattatttggtcgggtgcagtggctcacatctgtaatcccagcactttgggaggctgaggcgggcagatcacttgaggccaggagtttgagaccagcctggccgacatggtgaaaccccatctctactaaaaacacaaaaaaatcagctaggcatggtggcacatgctggtaattctagctactcaggaggctgaggcatgagaatcatttgaatttgggaggcggaggttgcagtgagctaagattgtgccactgcactccaacctgggtgacaaagcagactctgcctctaaggaaaaaaaaaagttatttgttgtttagctgaaattcaaatttaaataggcatatggtttttgtttttgaaatctgttatccataccgcctgtgcatgtgtgtgcataagaaataatatggggctggtgttttatcttatttttaatttttttgtttgtttgttttagagacaggatctcactatgttgcccagctggtctttcagctcctgggctgaagcagtcctcctgccctgcctcccaaagtgctgggattataggcatgagccactgtgcccgacctggtgttttaattactttttgaaaggcccaatacttttgtttcatctgcttttactttgtctttggttagtcatagaaagaactgaaaaaggagccagatgaaataaacagtgactctgacttcagcatcactgtgggcttaaacagatgtaagcttacagagaacttttggacatggaaagtgatttggttctttcctttctgtgctaatgtcaaatttagctttcacttttttttccccagcatttccagaactctctcttcctttattcccttacagtgataatcattttctactcaattttagattcgattggtattacctttggctttctttttgccagtatggtctagcagacagagcaggctttgtaatcagaccaaccttgtttttattccagactctttgacttactagctctttgatctttttgatattacttaatttgaaggctcttgtgagaataaaattgagctaatatagtttacataaagcacttggtattgtgcccggcacattgtaatgctagttatcatccctttcctatgcaaattgggatgagggagtcagcattatcacttcgcattgttgaagttctcaataatgacatagaaacatagttacaaatgaatattgcctaatgggctgagaatggatccctttaaagtaattcctttgtttcagtttaatcatatttagctgtgcttttaaaagcttgaatttttagtcctattcctggcactctgtattagctaccaatatttgcttttaaaaattaataaaaatatgaaaaatcaagaataggcaaatccagagagatagaaagtagattagtggttcaggagctagggaaggagaatggggagtgactgcttaatcagtacagggtttctttttcttttttcttttagagactgggtctcgttctgtcacccaggttgaagtgcagtggcatgaacacagcccactgcatcctcgacctcctgggctcaagtgatctcacctcagccttccaagtagctgggactataggtgtgtgccaccatgcccggctaattttttattttttttgtagagacggggtgttcctatgttacccaggctggtcttgaactcatgggcacatcccatgatgttccctcttctaaaaggactgttactgcttaaattataccaattcctgacttttttgcttattgtcattttgtaaaatggaggcaagggaaaagtgattcagagaagacgttgtattgtttatgattacttttatccttattttatttttgaagcattaagagtatcaacagtgctgaattaaatgcaatttctttttagtttaaagtttacagtggtaagtgatcctctggatgaagaaaagaaagaatgtgaagaagtgggatatgcatatcttcaactgtggcagatcctggagtcaggaagagatattctagagcaagagctagacagtgagtcatttttttttcagttctaattatttccaaggaaatcatcctaatagtgaatatattttatcttcaatacataattattactatgaagttgataagacacaaagtggattgaaatcttatccctacaactgtatttatttctggatccaacattaaagtagtcagttgtgtatttttacccccatatacctgattacaactagaattgattttgaatctacaatgtttgaaaaggagatttttaaaaagacaagttattttcatttcaaatttatacatcagaattttggacctctcttgagcattttcgtataggcagctgatgcccattctttatgttatcatgcatccagtcttttttttttttttttttttgagatggagcctcactctgtcgcccaggctggagtgcagtggtgtgatctcagctcactgcaacctctgcctcccaggttccagctgttctcctgcctcagcttcctgcctcagcttccatggtgtgccaccatgcctggctaatttttgtatttttagtagagaccgtgttttaccatgttggccagactggtctcgaactcctgacctcaagtgatctgcttgccttggcctcccaaagtgctgggattgcaggtgtgagccactgcacctggcccatcttgtctcttaaaaagacattaactgtctcctctttcctcacattcactggtcattaagtcttatccattctacttgtgaattgactatgctctccttactacaattttttttttttttttttttgagacagagtctctctctgttgcccaggctggagtgcagtggtgtgatctcggctcactgcaacctccacctcccaggttaaagcgattctcctgcctcaacctcctgggtagctgggactacaggcacctgccaccacgccagctaatttttgtatttttagtagagacgggctttcaccatgttgcccaggctggtctcgaactcttggactcaagcaatccaccctcttttgcctcccaaagtgttggcattacaggcataaaccactgcgcccggcctccttaaatataattactataatttctttcttttttttttttttttttgagatggagtcttgctcttgttgcccaggctggagtgcaatggaccgatctcagctcaccacaacctctgcctctttcttaatcaagcgattttcctgcctcagcctccctagtagctgggattacaggcatgaaccaccacgcccagctaattttgtatatttagtagagatggggtttcttcatgttggtcaggctggtctcgaactcccaacctcatgtgattcgccctccactcagcctcccaaagtgctgggattacaggcgtgagccaccgcgcccagccatataatttctaaactggtcttcctgccaccggtttcttctaccccatttccatctactatagtaaatacataatacatttgatcactgccttcttcttaaatccttttacagtttgctatagatcagcatgttttaaaaacatttgtatttgagtacctttagttgggactgcgctgtccagtcttcactgttcccattaccttacatagctgggatgtcacctatcttatctgctaggaccttcagacacttaagattatccactagatcaatgtttttcaaacttccagacacacaccccattagtggatgtgaaactgaattagtaaatcacaaggaaatttgaaaaatgcaaaccaaaactgtgggaaagaaaacaggaattaaaggccaggcgaggtggctcatgcctgtaatcccagcactttgggatgccgagatgggcggatcacctgaggtcaggagttcgagaccagcctggccaatatggtgaaaccccatctctactaaaaatacaaaaaaaattagccaggcatggcggcggacacctgtaatcccagctactcggaaggatgaggcagaattgcttgaacccgggaggcggaggttgcagtgagctgagatcaagtcaccgcactccagcctgggtgacagaacaagactctgtctccaaaaaaaaaaaaaaaaaaaagaaaacaggaattaagagtacatagcacatattgtcttgtgaaacttgttttatgtattgtttaatgaatcatggtataaaattattcttactgatcattataaacattttttgaggaatactcctcagaccctaaggtttacaaagttcaaatgttagataagattctaattatattcctctagtatctttccaactgtgatccttagtctttttcctcatctataaaacgggaataacagcagtctctatcttactgagttgtgaagattaaggaagcacttaaataagggattaaggggcttagggtagtgcctggcataaggcaagtgacgttatctttgtgggctattttccaactcactcctatccccattcctaaacatgctatgttcttcctgacctccatgccatttgtatgtgcacagggaaaatccacttaagacttttctggtgatttctccagaaatcctttccaatttgtccattctggtgcagatgcctcgttatgtccccaaagcaacttgtgcttccatttattatatagcacctatacactataccattttcctttctccttcactagattgagtcctcttatgaaatgggtaatttcattcatttagcatccccagtacctaacctgacaaataccaagtatcaaagtgttcaactgagtgatgctgtttttttccctttcccaacagttgttagccctgaagatctggctaccccaataggaaggctgaaggtttcccttcaagcagctgctgtcctccatgctatttacaaggagatgactgaagatttgttttcatgaaggaacaagtgctattccaatctaaaagtctctgagggaaccatagtaaaaagtctcttataaagttagcttgctataacatgaa

SEQ ID NO: 25 - DNA, 50644 bp, Homo sapiens
  source 1..50644: mol_type = genomic DNA; note = SLC12A3_gene
ctggcccctccctggacacccaggcgacaatggcagaactgcccacaacagagacgcctggggacgccactttgtgcagcgggcgcttcaccatcagcacactgctgagcagtgatgagccctctccaccagctgcctatgacagcagccaccccagccacctgacccacagcagcaccttctgcatgcgcacctttggctacaacacgatcgatgtggtgcccacatatgagcactatgccaacagcacccagcctggtgagccccggaaggtccggcccacactggctgacctgcactccttcctcaaggtaagtgctgtctcagaagactggccacttccctgctgtgtgacctcgacccagctacctaacctctctgagcctcagttctgtcatctgtgccatggggatggaggagcgtcttcttcctgggttgagaggccccagtgaaatagtggagctgcagaaatctgggcacatgttggaatgtatattagccaatcactagcaacccaaagctagagtgggaggcctagagaggtaatgagcttccagtgagtagaagcatgcaagcaggttgcacacccctgaaagagacagggcaagaagggcctgggaaggttcacctcagagagagggctcgccgggtttgctgcccgggaggctggactgtgaagagtggagggctggaaggtggattgtcatgacccctgtctggcctcacttttcccatatgacaattgggctgaattgttcttttttcttttcttttcttttcttttcttttttttttttgagacggagtctggctctgtcgcccaggctggagtgcagtggtgtgatctcggctcactgcaacctctgcctcctgggttcaagtgattctcctgcctcagcctcccgagtagctgggattacaggagcgcaccaccacacccagctaatttttgtatttttagtagggatggggttttgccatattggccaggctggtcttgaactcctgacctcaaaggatccacccaccttggcctcccaacgtgctggaattacaggcatgagccaccacgcccagcccagaattgttcttgattctgaggctaagacttactaaattcgcaggccttttctccaccccagagcaaaccaagacatggcccttggctccatactgagatgaagtgccaggaagaaagccccagaggagggcgtcagtcacttggggcacaaactaggagacctcccagtgccccagaggtagaggcctggtttcaagacccagccctccagggaccaactatgtggccttggacaagctttcacctctccagggtgataataatcctgtcgcccattacaaggctaggcaactgcctaatcacttctaaggccactgctctcctagggggaggaggtgttatgagcaggagcgcccaggactcccagtctcccatggcatctgatcttggatcactgcaacctccacctcctggcttcaagagatcctcctatgtcagcctcctgagtagctgggaccacaggtgcacaccaccatgcccagctaatttttgtatttcttagtagagacagggttttaccttgttgcccaggctggtcttgaactcctaagctcaagcaatccacccaccttggcctcccaaagtgcttttactacaggcgtgagccactgctcctggcctagggagcattttaaaagcccctcaagcagctcaacacccagtgggctgaggggtcggggggtgctcggtatggggcgcagtggtgcaggtcagtgggctggatgcagagacgccgtccctagcacccctacctgcctgacttgtggtctctgggctgccagcaggaaggcagacacctgcatgccctggcctttgacagccggcccagccacgagatgactgatgggctggtggagggcgaggcaggcaccagcagcgagaagaaccccgaggagccagtgcgcttcggctgggtcaagggggtgatggtgagtggggtgtgggtggtgcgtgatgtccagaaatgggggtggggtggcagagctccatccaggctcagctctgactctcaggccctggtggggcttcagtttccccatctgtacaatgaattcaatgagttaatagatcaatagacaatagattaaagcctgccggggagtaattagaagaaactgtgtttccctaaaaagccaccagggggctgcactaaacacacaaatccgtaaatgtgtttttctcctccatgaagggaaggaaaaggtttgctatagtgaggagcaggattaagtttccagacagtagacaatcaaggacacttggctttggagacattatgggactttacagaggggatcttatgggatgtagaaggctttagccctgctccgggaggcaggaggctggggttctgatcttaacgctgccaactggctgtgcctccgtttctccatctgaaccacgagccctccccgacccccagatgctcttattcagagctgggatctccctcctgggctgtgttgccagagccgggaacggccctgcaactcagtggggccagcgaccacaccagcccctcccacctggaagcttcagcctccatctcggcctctggctttgctttaaatttggaagctgaagtcacagccacctgagctctgatatctgctcttacatggggcgctggctcacctggcatttgctgagctccctgtaaatgccaggctctggatcaactgctgaccactggggccatggtcggggctggcagacacaggatcctgggcttgggatggatacagtgagggctaacagtgctggtagcctagcgtcaggactcaacgggagggtgggaaaataggtgggagggataggtgggtctctgggtgcctctcaccctcttgccccatagaaccagactcggaacctactgaagtgggtgaagaagggacccaggtgtccctagggcctaggtgctcgataccctgccatagcaagggacagggacttgtcgtttggccttggggtgtccacccaggtggcctctgacccccctgtcctcccagattcgttgcatgctcaacatttggggcgtgatcctctacctgcggctgccctggattacggcccaggcaggcatcggtgagtgcccctctggggaagaggagggagggcttgcctgaatcccattcttcccagcttgcctgaatcctgttcttcccagaccccaaggttgcaggattaaacttgaggtgcagagaccaaacggccaggccttctcctccctggttcagtctcaggcccctgcagtgacaggggtcagggtggtgtggcagaggcacgctggacatggggtcagcaggcctaagggctatttgccctcagtaagccacttaacctctcagagcccatttctacctcaaagcgtgcaggttagaaagctgcactctggccgggcacggtggctcacgctttgggaggctgtaatcccagcactttgggaggccgaggcaggtggatcacgaggtcaggagttcaagaccagcctggccaacatggtgaaaccctgtctctactaaaaatattaaaaaattggccaggcgtggttggcaggtgcctgtaatcccagctactcgggaggctgagtcagagaattgcttgaacctgggaggcagaggctgcagtgagccgagatcacgccactgcattccagcctgggcaacagagtgtgaaactccatctcaaaaaaaataaaaaataaaaaagaaagctgcattctggacagaacaggactcagatgctagctctgtagcctgctatgtgactttgggcaagtttcttaacctctctgagccttggattcctcattaggaaaatgagggtgataacagaacctacctcatggaaccgttgtggcttttacaggatgcaagtaaaaacacagcgcagatttggctcccagaggtgatcacggagtggtaactgctactttattttttattattaaacgagggtagcttcccctccatacctaacaatccaataaatgctggctcaagggctcactggctattcagagtatgacaggaggtagacagagacccattttttttttgagacgaagtctcactctgtcacccaggctggagtgcagtcgcgtggtctcggctcactgcaacctccgcctcctgggttcaagcgattctcctgcctcagcctcctaagtagctgggattacaggcatgtgccagcatgcctggctaatttttgtatttttagtagagacggggtttcaccatgttggccaggctggtcttgaactcctgaccttatgatctgcccgcctcggcctcccaaagtgacagagacccatttttcagatgagaaaactgaagctcagagaagggagatgaacgtaggtcgcatggtgaatgagtaggcaaactggggctcctcccttgggaaatgccctgcctaagctttgggtgccccctgcagtcctgacctggatcatcatcctgctgtcggtcacggtgacctccatcacaggcctctccatctcagccatctccaccaatggcaaggtcaagtcaggtgggccatccccctttccaccaaggccctcctctcgtgggctcctaatcctgggaacaggactcccaacttccccaacccaatggtacacccagccgctcctgtggttccgggagagggctctaggcaggctgtctacaccacgagatggcctcagctatctcctgccccgtgggtcctgtggccaccctctcctggcctctgcctgccctgagtccaccccagccaaccgactcatctggtttcatggttcccggctctgccctgataggtggcacctacttcctcatctcccggagtctgggcccagagcttgggggctccatcggcctcattttcgctttcgccaatgccgtgggtgtggccatgcacacggtgggctttgcagagaccgtgcgggacctgctccaggtgaggccggggggctggaccctgggtagagggatccgggcagcccattgcactctcctccgccccatctgggctggggcctcctgctgctctgcctgacttcacccatcaggaaccacagcctgatcactgtgggtgagagtgacaatctcatcaaataaaggccattgctttcccacaagtcccctttgggggtgtgtgtggcctttagagccacactgtccaggcccgtgcagcagctgctttggggactcgatggcaggggtggtgcttgagttaacatcgtcctagcagagtgcaccgcacaggaggtgcctcctaggtgggcagagtctgggggatggggaattcagagggtggcttgcagcctggcccattttccctccccaggagtatggggcacccatcgtggaccccattaacgacatccgcatcattgccgtggtctcggtcactgtgctgctggccatctccctggctggcatggagtgggagtccaaggtgaggaggccatggaggagggggacatggaggtggtcacgtggagaagcgggggttgccaggcctgggccctccctggtcctctgccttttctttttcttttctttttttttttttgagacagaatctcgctcgatgtccatgctggagtgcagtggtaccatctcggctcactgcaacctccatctcccaggttcaagagattctcctgcctcagcctcccgagtagctgggattacaggcacctgccaccacacctggctaatttttatattgtttgtagagacggggtttcaccatgttggtcaggctggtctcaaactcttgacctcaagtgatctgcccgccttggcctcccaaagtgctgggattacaggtgtgagccactgtgccctgctgctttgtatctcttgtgtgacaacctaggtccacatggcccagggtgggcatggtggctcagggggccgggcacccagactccttccatcttgtgctccctccatccctgcgccgtggcctttgtccacctggtccaccatacccacatcccctccagtcagagggaaagcaaagaagggggaaatgaaagggagggaattcccttttctctttctttttatggcaccatctggaagtttcactatcgctgtcacacatggctgcgagggagcctggggaggtgtggccttcaactgaatcatggatcctgctggcagactcagccggacaggccctacaggcagggcaggacctggcccctgcagcctgtcctctccccgcattttctgacctgcagctgtcagagggtgtcctccttgctcttccttggatgccctgagctgaattccctggacagttctctggcttgttcattctcccacttaaggtgtctgctaaacaccttctctctggtgacaccttcccaggtcatcctgctaaatgagctccacccagtccccatcacactccctcttctttatttatttatttatttatttatttttgagatggagtctcgttctgtcacctaggctggggtgcagaggcgtgatctcggctcactgcaacctccgcctcctcgtctcaagcaattctcctgcctcagcctcccaagtagctaggattacagacacccaccaccatgcctggctaatttttgtatttttagtatagacggggtttcaccatgttggccaggctgatctcgaactcctgacctcaggtgatccgcccacctcggtctcccaaaatgctgagattacaggtttgagccactgtttccggcctgtatttttagtagagacagagtttccccatgttggccaggctggtctcaaactcctgacctcaggtgatccgcccacctcggcctcccaaacctcttcttactttaaattcatcctccttatttatcagccaagacaagaggctttggcggtcttgttcactgctatattcccaactccttgaacagatcctgctgcataatgggtgttgaatgaatgagtgagtgaataatggagaaacgggccctgggcaaatcattttctggcggggcttcccagagaggtagaacaaaactatctgacctctggggtccttcgccccctccaggcccaggtgctgttcttccttgtcatcatggtctcctttgccaactatttagtggggacgctgatccccccatctgaggacaaggcctccaaaggcttcttcagctaccggggtatgtgctgatcaaggccctgaccatggctctggggacagggactctctacccaggaatctggcccattgtgtggacactgggaggatgggattacccaatcccatggtcaggggctgcctgcccagtgggtcccagcaaggggggtcaagccctccaggtgagccttactcatcaggccttgcttttccagcggacatttttgtccagaacttggtgcctgactggcggggtccagatggcaccttcttcggaatgttctccatcttcttcccctcggccacaggcatcctggcaggggccaacatatctggtgacctcaaggtgagcagaatacttgcccctcctgtgtcctggcactgcacaggggctatgagcagaatcctgccccctgctctagtggcatctgccgctgacctgggaggcagggcttctaaaatccagtccagtccaactcagctcagttcaacccaatccaaccgattccattccgttctgaggttgtttatgaagaccagctgcgttctaggcttgagggacaccacagaatggctaggttcctccctagttcccagaactctcagccttaggggaagactggcccagctgtgaccttaagagcccagccttgctcatgcacatctttgctgggctgacatcctcccagggctccccactgccttgctgcaggcaggcttcttggcttggcattcaaggctccagcctgcctgtctagcctcatccctgaccagtgccacccttcccatgagcctgctgcagccctgaggctctactgctttgcccgtgttacctcgtccctcctccacgcctttgcctgtgctgcgctctctacctgcaactccgtacgcttgcttttttaccctgaaagtctgttctgtttctctttctttctttttttttttttttttttttttttttttgagatggagttttgctcttgttgcccaggctggagtgcaatggcatgatcttggctcactgcaacctccgcctcccgggttcaagcgattctcctgcctcagcctcctgagtagctgggattacaggtgcctgccaccgcacccggttaatatttgtattttttagtagagatggagttttgctatgttggccaggctggtctcaaactcctgacctcaggtgatccattcgcctgggcctcccaaagtgctgggattataggggtgagccaccatgcctagcctcttttatttattttattttatttttttttttttgagatgaagtctcggtctgtcgcccaggctggaaggctggagtgcagtggcacgatctcagctcactgcaacctccgcctcccgggttcaagtgattctcatgcctcagcctccagagtagttgagactacaggcacctgccaccacgcctaactaatttttgtatttttagtagagacagggtttcgccatgttggccaggctggtctcgatctcctgacctcaagtgatccacccgatttgtcttcccaaagtgctgggattacaggagtgagccacttctcctggcctgtttctctttcaaataccgccttcaactatcatctctcccagcccttccatcagagtcatggttccccagcataatgatgttgggccaaacgcgtatctgttgccccggcatctggagaacggagacttgcctctgtctccctattccctcccagctcagagcctggcacatactaggtgctctgtacatgtttgttgactgaatcatggtgaaatgcagtgtttgagcagtagcacaaagtgctgcaccagcagggagaaggagagactgatgttggcaggggttccagcagaatttctgggtgcaggaggcgccagagctgggctttgaaaggtgacaagctggcagaacctttgctcaagggaggtggcaggcaagagggggtgatgaatggggagctagccccacactggaaatcacagctaacccctaccccaaacctccagtctcatttggaaggcgctccttgatgcattttcttaagcaaattaagagctgtgcattgagccaggcacagtggctcatgcctgtaatcctagcactttggaaggccagagcaggtggatcacttgaggtcgggagttcgagaccagcctggctaacatgatgaaactgttttagtctccactaaaaacataaaaattagccgggtgtggtggtgggttcctgtaatcccagctactcgggaggctaaggcaggagaattgctagaacccggaaggcggaggttgcagtgagccaagatggcgccactacactccagcctgggtgacagagcggaactccatctcaaacctcacccccccgcaaaaaaaaggaatgcacatggagtcgactgtgaagccagcgtggctttaagcagctatgcaccaggtggtgttgggcagggcctggaaattggagaacagccgttggtttggctcctctcctttttctggggaatggccagcagaggcctggtctgcctgccctgaggtcccgcagaggttgggcctgtgctcagacagcctggattccatgcagtctcattagatcgttgcctgggaatttatctcgatgcctcatcaagctttttaggttaccaaccagcaggcgtcagctgtcttgaagctggatgaggcccgcgcgcctgcactctgtcctaaatgccctcaagctttaaggggctcttggatggcctccacccatcctgtgggacagcatcctcagcagcagagccactgtttgtggagccctcactgtgacattttgggcaagtccctttaaaactccctgggcctcagcttccccaattctaaaatgggacgagtacagcccccatcttgcagggcggtggggaggattccatgtgctaattcatgtaaagtgcttagaatagtgcctggctcagagcaggagctaagggcttcttgttatcattgtcatttttaccatgatatagacaagcaagccaaggtcagagaggttcgggggcctgcccaggactacacaggtggcagaggagccggaatgccagtttctaaaacagagaggcctcaactacatcacaatttcatcatctaacaaatacgttttgtgctgcctcagggcatgcccctgtgcacaatcctgcccccaccccaacagctcacatttatgggcacttgtcacctgccaagttattttctgatttcacagatggggaaactgaggctcagggatgttaaggggcttctcccagtgcacacagcagggaagaggtgggctgagatgtggacctggatgtgcctaacgttgttaaatccccgggcaacaatctcagagttaggcacatccaggtccacatctcagcccacctctacccagctcacctcttctctgcttgcctcttcccagcacatccagaggctgagatctcagctctagatgcaggaggcaggatgggggctgatggctggtgtatttgtgttttcaccacaaattgggtggcttaaaaacagacctatattccctccccgttcaggaggctaaaagtccgggatccaggtgtcagcaggaccaagctccccctgaaaacccaggggagaatcctgccttgcctcttcctaatttctggtggctgctgacagtggctttttcttggctggcaactgcatcactccaatctctgtctctgtctcacgtggccttctttcatctgtgggtcctttccttgtaaggacaccagtcattgcatttggggcccaccctaatccggtatgacctcatctttactaactgcacctgcaaagaccctgtttccaaataaggccacattctgaggttctgggtggatgtgaattttgggggacgctattcaatccactagaggcagggtgggaggctggtgtgttctgttggctttggggctggggaccccatgtgcatggcccagttgagtcaaacaggtttgccgggcagggctggcaggtccatgcctgcaggggccctgcagagccctggggtggagactccacccaaagccctgggagaccgaggcagggagaagaaattcaacagctccacgtctgggccacagagggcacttggccaaggcttggaggtcccagcagacctgggctctagagactccagctctacacctctgttcccattttccccaggcctgccacatcctccctcccacctcctcctggtagccccccaacacacttgacttgctcctaatctgcggtgccatctgctaactggatggtgagcagaacagcccagggaaggctgggggggtttataaattgacttcccatggcaggcctggcctttgccttcaggttggggtctgtgtctggaaagtgagcaggtcttgaacttactgtaaaaatcccagcctgtgttgctgcacccaggatcagtccttggagcccgaggctgttgactttggtgtggtcaggcccagagctgtgtcctcctcgcagctctctgccctcagtttccccaccagctgagcaggggtgcccaggccacttctcaggaaattacatttgagaaagtgcctagaagagtggaacacatgctgtgttcgtgaaggcttgtgatcactgttaagaaaatacgagcggccgggcgcgggggctcacgcctgtaatcccagcactttgggaggctgaggtgggtggatcacttgaggtcaggagttcaagaccagcctggctatcatggtgaaaccccgtctctactaaaaatacaaaaattagggcgcctatagtggtggtacatgcctgtagtcccagctacttgggaggctaaggcaggagaattgcttgaacccagaaggtggaggttgcagtgagccgagatcatgccactgcactccaacctgggtgacagagcaagactctgtctcaaaaaaaaaataaaataaaaataaaaaataattttaaaaaagcaagaaaatatgagcagatatttatttcttagaacggaaggagaaaatttggggtgtatcctatttatggttgaggaaccagacaaatcaattggtgcataatgattgaacacgctgtgagggctggcggggaggggagtcctggtctaggatgtcaatgtggattaatttatttcaccaacatccctgacagatgaggggccggggtgtgagagcacagccccctgcccagctggccgcctggaagtgaacccgggcaggccgactccagagcccaccaccctgcccccacccttaccaccctcacagcaaaccctggccaagtggcctctgtggcgcaggcgtggagctgttgaatttcttctctctgcctccatttcccagggccttgggtggagtctccgacccgtgatcttggttgtattcatccctctctgggggtcctcagtcatgaggctccttcctctctgtgctggaacaggggctctgaggggccaaggtcagaggttgctgcccccagcctcagccttagacaaggaggacaggcctggaaggaggcccaggggctgcctaatgtcctccgtccctccctccctctctccctccctccctccctccctctctccctccctccttcaggaccctgctatagccatccccaaggggaccctcatggccattttctggacgaccatttcctacctggccatctcagccaccattggtaagtggccggcccagccagtcaggagggggagggacctggcctccaccctgcagtgtcccaaaaccctgaccactggaggggatcagagggtggggttcgactctctaacaacagggagagctgggctgggagggtgtggcgaccttaggatgtgaagccttgaacctatctctggggtatcttggcaatgatcagagcatcttcatggcagtgggcgtggtggggtcagaccaggctccttgggtcccttgaaggcccagattcatgagtgtgaagatcctacaggacaaatctaggagtgatgatgatgatgatgatgatgataatgataccagtaactgacttcccatgtgccccgccctttgcatgccagtcctatcattgtcattttccctatttcaccaaggagaaaatgggggctcagagacgttaagtgacctgcccagggtcacacagccactgaatggtggagccaggctttgagcccaggtctgggctgttaacacctgccttgaactgagatcctcacagatgtacttcctcccagtggccccgtttgaggcaagctgttcacaaatggccaagggacttggtccagctcacagccactcgaggcttgagatccaggtctccgatctaaggaggacattgtgatcttggtcactcaagctctctgcgcctctgtaaaatggcaacgacaacaaaaataatagtaatgcctgctcgtaggttattgtaaagtacttatcatggctccgggcacaccttcattgtcatcattatcattgcataatgaagggacagctgcccatcatctgcagcacctcgccctctgcagaggtggggctggaagaggacagagtaaggagggaaggcagacctccccatgctctccttcctcctctcaggctcctgcgtggtgcgtgatgcctctggggtcctgaatgacacagtgacccctggctggggtgcctgcgaggggctggcctgcagctatggctggaacttcaccgagtgcacccagcagcacagctgccactacggcctcatcaactattaccaggtactgccaggagagctgacccaccagacacagtgggggctgggtggaggctgcagggccccttgcaggcctggaagtttgttggggggacatagttttgggggttgaggcctaggcttaggagagaggggttcagagcccaggtctgtccagtcccgacttgtgggtggacactgggatctccaggggtgggttgtggactcaggtggaggctcaggacccagcccctgcccgcagtagggaatgaagtgccacagatgggggctcctggctcagcccccaccgtggagtccctgagccccaaatccccacagaccatgagcatggtgtcaggcttcgcgcccctgatcacggctggcatcttcggggccaccctctcctctgccctggcctgccttgtctctgctgccaaagtcttccaggtgaggccgcagaaaggggtcgagatgacagggggtggggagcctgggctagaggcacaatagggcgggtccctgggtgactgctacaaacacctgaaggtgtcattagactggggtctctagccagaagggaaaaggagctatcagcaaactcttgaaggaagcagccccctccgacttgacaaacacctgcagtccccaccccaaactcccacctgtgccaccagcatcctgtccgcaactccaccattcaagctctacccgaagccatccatcccccagtcatgctcttttactgtctttatggtagggcggggagggtggagggggtgagcatccctgtttaatagaaacagacaccaggacccaggttggggaggtcacggagggcaccgagccggggctggagctcaggtggccccaggggaggggaagtggcaggtcccagcctaagggtgagtgcggcatctggtgctgcagtgcctttgcgaggaccagctgtacccactgatcggcttcttcggcaaaggctatggcaagaacaaggagcccgtgcgtggctacctgctggcctacgccatcgctgtggccttcatcatcatcggtaaggctctgccagggctcacagggcctggcctcctgttcccctggccggccatgagggtcttgggggccgggctcttctcctgtctcctcatctccccgccgggcctgacagttagtgggcactaagaggctaagtcttgaggggtgagaccccacctgggaggagacatcggggggccatgtgatccttccccttcccacctccaggcagggtggctcccaaaccatgtcaggcagcagagccttctgctttgttagaagagaacttacctgttcccccggtctgcgttcacatgtcctggcagctagcatccccctccccaggcctaaatgaaccccagaacacctttggagcatgggacaagctgactggtctctccttgggatgggataccaatggctggtcagtatcctcataggtatataaactagacaaacctagttccaagggcctagggcttctagactccttgggcttcaaggtggtagatgtcttaagagaaaagagcccaggtaatcggttcattagatcaacttcctatccaggctttgccatgtgccagctgtgtgaccttagacaaggtacttcacctctctgagcctcatttttctcatctgcagaatgggagcaatagtgcctaacaggtgtgtctcagatgggcaggaagagaccacctgtgcaggaagacctacatgcattcatatatgcacacacactcatatgtgcacacatactcacatgtgcacatgcccaatacttgcctaatttacttagccatggaggcagaactcgcgaggagagaggtggccacaccaagcacgggcagtggccatgctgcaacatgatgtcccctggcccctgctccctatgcaggagtgggatgggggtagactactggccagcctccctgggctcatgggcaccctcctgccaacagtgaatccatgccgttcaggctggtatcacagtccatgagatttgccctgatagcctagtcactattacccaaggtaagcttttcagacaccaggcactactgggtcctggaccacatgaagaggtggcagggatggaaaagtctggtcagacttgatgttccccggccccgtctctgcttcctgctcaccggggcccagaaacacatttccctgcaatgtaccctgatgcagattcgatgtcctttcatctgggggggggtctgacttgacttcagactgaggaccatgatctcagatgctccgggcagggttcttaggtgattacatgaaatcatggacagaggacctggcacattggtgcacgtcgtgttttgggatccccagaagcaggccccgagacaaggattaatatgtaaaagtttatctggggtgctgggggcagtagcaggggaggggaacagggagacagggaagaggaagcagttcttgggtgggttaccactggggtaccagtggggtggagctgtgttacggtcttaggtgtcctgggccacattgcaaaatgtatttctggccaggcacaatggctcatgcctgtaatcccagcactttaggaggccgaggcaggtggatcatttgaggtcaggagttcgagaccagcctggccaacatggtgaaaccctgtttctactaaaaatacaaaaattagctgggcgtggtggtgcatgcctgtaatccaagctactagggaggctgaggcaggagaatcgcttgagcccaggaagcagaggttgcagtgagccgagatcacgccactgcactccagcctgggtgacagagcgagagtccgtctcaaaaaaaaaaaaaaagaaaagtatttcttgctgtcatttgtggtcaaaacagtgtgacagccactacccttggtcatcccatagcctgatggggtctactctcacactgacccccactgtcttaaaagctgggcgcttacagtttacaagacaccatccctttgagcttcacaaaaggatggacccatctcacagatgaggtggacccatttcacagatgagaaggttgagactgactgagccttggtggcctgtctggggtcccccaccctgggaaggagggtgccaagccagtccttggcagagttgcccaacaggctgtcctctctctccctgggtccccgaagctgagctcaacaccatagcccccatcatttccaacttcttcctctgctcctatgccctcatcaacttcagctgcttccacgcctccatcaccaactcgcctggtaagcaaacccttcacccacctcaggaggaggcacccagggggcaggaggaactggggcatggggtgggagtgggaggcatgggtggaggttggcagcccaaggtcacctctcaatttaaaaccattgaaagggaacattaatataataatagcagctctcggctgggctcggtggctcatgcctgtaatcctagcatttttgggaggcggaggtgggcggatcacttgaggtcaggagtttgtgaccagcctggccaacatggtgaaaccctgtctctacaaaaacacaaaaattagccagatgtggtagcggtcacctgtaatccaagctattcgggaggctgaggcaggagaatcacttgaactgggaaaggggaggttacagtgagcagagatcgcgccattgcactccagcctgggtgacagagcaagactctgtctcaaataatagtaataataataatgataataataatagcggctctcctttctcgcgcactgacagtgtgcactttacatggattcatacattgcttaccatctgtaggggttttccagtcttttccttccccagttttacaggaatcaggagcctggttcttcagagaaagagaattgcccaaagtcacagctagggctgtcacagacagtgctgcaggttgcacactgcataactctaggaggcaccattcatatcatagatttcatatatttgcatgtttatgatggaaaacttctggcagatggcaataaagaggcttgaggaagactttttctttctttttttttttttttttttgagacggagtctggctctgttgtccaggctggagagcagttgcacgatctcggctcactgcaagctccacctcccgggttcatgccattctcccacctcagcctccccagtagctgggattacaggcgcccaccaccacgcccagctaattttttgtatttttagtagagacggggtttcagcatgttagccaggatggtctcgatctcctgacctcatgatccgcccgcctcagcctcccaaagtgctgggattacagttgtgcctggctgaggaagactttttctaaccagctccaaattgccattgtcttttactaggccaccttttacatagatcccaatgtgtatgatggccctggagttgcaccatgaggcagctgtcactagtggcagccctggcctgacctgctggtggggagccaggcagaatcatgtccttccccctccatctcacccccttggcaccatgggagctggtgctgttgctgacatgggatgtcctgtggctgtatttggccagagctggatgctcctggtgaaatgccagccaaagcaggcgtgtgatttgccccagagcctgtagacccagcccaggaggcagggtgggtggtgctcatggctggtgggtacaggctgggaccccggctctgggcactgctggcattactgccaggccctgcccagcagctctggcctagaaagaggctcgactgccaggcatgcccactgactggtgcccttggcccagggtggagaccttcattccaatactacaacaagtgggcggcgctgtttggggctatcatctccgtggtcatcatgttcctcctcacctggtgggcggccctcatcgccattggcgtggtgctcttcctcctgctctatgtcatctacaagaagccaggtgcgcatctcagctgcggggcctcggccctcctcccccagggtagccatgcaggcggccctgccctccgccccagttggagggccctgagtccggctctgtgctgtccagggcccctctctgcccctcccctttatccctcccaatgtggcaagaaaccccaggggatgtccccactcagggcctatgtctcgacctctaagccacccctgggcacccaggaccctggaatcccctgtccgaaggaccctgagtgagcttccagggcctgcttcagcctcttccctagggctgtcccccaagaggggccagcaggctgctgtgcacacctaggcctcagaggtggctgagggctggttgtgtggatggcaggcagacaaagcttggactccgggcaaggtctctacttggctgcaggcagggaccctggggtggcagcgacctgagggcaggaaacaggactctaagaaagcctgggattctaagtgtcaacctgggcttctaggccattgcaaaggtttggcaaggcaggaggatatcgtgtggagcttgaggtgtaacttttttgtggggggactggggtgcagtgtctcattctgtcacccaggctggagtgcagcagcacaacctcggctcactgcaacctccacctcccgggttcaagcaattctcctgcctcagcctcccgagtagctgggattacaggtgcatgctaccatacctggctaacttttgtatttttagtagagacagggtttcaccatgtcggccaggctggtcttgaactcctgacctcaggtgattcgcctgcctcggcctcccaaagtgctaggattacaggtgtgagccaccgtgcctggccttgatgtgtaacttttcaacgtgcagccacacagtccgcaggcctccaccttgcaggctgcccatcccaggtggccctgctcccacgggtgcccggtgcctagagaaggccgacattacctctgtccctccacgtgtctggtttcctctagtgattcctaactctgctctcacccccgttgctcccttgctctcccagaggtaaattggggctcctcggtacaggctggctcctacaacctggccctcagctactcggtgggcctcaatgaggtggaagaccacatcaagaactaccggtgagcagagctgctgggacccacctgggaccccagggccagtgatggctccaccctgggagtttccaagcctagacctgtcacctgacccaggcagacccagggtatgtgcagcctccactcagagagggaacagacatggaggagccacccagccaccacaagacaggggtggacatatcctgatggggaccaagcaagtcaaggggcctctccatgccttggtttccacagtggaaacgtgctttggtgttgaggtgattgttgctgcagctcccatcacagtatcgccggagccaatggtgacgaacctcccctgggtacccttcaaagctcattcccctctttgtagaggaggtttatgcacctgccatcctcttcccaccagatcctaataattattggcaatatctatttatgtcatgcttactatgagccaggtgcttgcaaagtgccttacacagccttacaagaaccggctgaggtccaggaaattactaacccagtcccaagaacactgaggcacagagaggttaagtaactggccccaggtcacacagctggcaagtggccgattaagtctggctccagttgactcaggtcatggcccttgaccactgccctctgctacctctcgacgcagaggctgagtcaccttcccgggtaactgatgagtttgtaagtgacaggtttcctcactcccaggctttgttctttcccccaccatgctgggctaggcagggcaggggacatgcatggggggtagcattttgtggcctgagcaggaaggaccagggagactagtgtggaggtcaccaaaagagcaggaagagccccaaaagtcaccctggatttataggtgggaagccgaggccccaagcatgtagggtcatgctggtggccacaccaccattcagggagcctgggaggtgcctttcgcacccagacccccgtgggctctctcctgatggctcctgcccttttcccttccctcctcagcccccagtgcctggtgctcacggggccccccaacttccgcccggccctggtggactttgtgggcaccttcacccggaacctcagcctgatgatctgtggccacgtgctcatcgtgagtggcccctggaggggcacaggggaccaggcatggtggctcatgcctgtaaacccagcactctggggagccaagacaggtggatcacccgaggtcaggagtttgagaccagcctggccaacacagctcctgggggagtcgcctgggtgtgatgtccacccacagagtgggggccgaggggatgcggagcaaggggcacccagccaggcaccccccatggaccccattctctccccttcctggcccctcttgctggcttctcccccagctgccctgcctcttttctgccccctccctctcccttcctccccactttctcccccactccttgtgttttcccttatctgggcaaaagaaaagggcaccgtgggtgctgccaagcccctggggcagcctccagggcaggagaggggttgaatctcaggctggagggtgaaggcagctggtgatgtcccctgcccctcccacccacagggaccccacaagcagaggatgcctgagctccagctcatcgccaacgggcacaccaagtggctgaacaagaggaagatcaaggccttctactcggatgtcattgccgaggacctccgcagaggcgtccagatcctcatgcaggtgccatggactgggggctcccctacaggacttacggcttggtggcacaacctggaaggcagaaagtcttggcggcccctttgcttaagccccttttgctgcagaaggagccccaactttttttttttgagacttgttttacttgtcacccaggctggagtgcaatggtgtgatgtcagctcactgcaataacctccgcctcccgggttcaagtgattctcctgcctcagcctcctgagtaactgggattacaggcacccaccaccacacccggctagtttttttgtgtttttagtagagacggggtttcaccatgttggccaggctggtctctaactcctgacctcaggtgatccacctatctcagccccccagagtgctcggtttacaggcatgagccaccatgcctggccagagccccaactttcttatgtctccagatgtgctggttctgggcactttctcggaatgcccaggacctgggaaactgacttggaagcctgtgggggcttgtgtcaccttggccaattctaactcttgggggcactgggagggatgtagggtgttggtgaccaagcgagaactagaatcgaggattctggaattcagatatttcctcccatcagtcatctttctcccaataaagttttgttttgtgcaaaacaaaaatttttaagattatatatatatatatatatatatatattttttttttttttttttttgagaatcagcacatctggagacatcagaaagttggggctctggccaggtggatcaccaactctgcccctctgatgggttccccatctcacccctatcccctggcaggccgcaggtctcgggagaatgaagcccaacattctggtggttgggttcaagaagaactggcagtcggctcacccggccacagtggaagactacattggcatcctccagtgagtcgggggagaggaaggggcttggggtctgttaatttgggcccattgggccttgagaagtggaaaagaagtagtgggtgcttaaaaagttgagtcctgctgggcaaagtggctggcatctgtagtcccagctacttgggaggctgaggcaggaagctcacttgagcccaggagttgaaggctgcagtgagcaaagattgcactgctgcactccagcctaggcgaaagagcaagaccccatctttgaaaaagaagttgagtccattttctcaaagctaaagaagaaacacgctgaggctgaagatgcccgtctctgacctgtgagtcatggacaccaaagccagctggggccaggcaggtagcaccatgagtgaagtgggccaggccaggggtgatagggagcagtggagactgtggcaacccagagagagtggctcctacttggctcgtgtccatgcagaatgggctctagtgcccgtgcagaaatgtgggcccaatgttgccagatcttttaatttttttttttttttttttttttttttgagacggagtctcacactgttgcccaggctggagtgcagtggcgctatctcggctcactgcaagctccgcctcccgggttcacgccattctcctgcctcagcctcttgagtagctgggactacaggcgcccgccaccacgcccggctaattttttgtatttttagtagagacggggtttcaccgtgttagccaggatggtctcgatctcctgacctcgtgatccgcccacctcggcctcccaaagtgctgggattacaggcgtcagccaccgtgcccggccaccagatcttttaatttttcagagtaactgcaaatgtgagtttttaggtgagaacctcatgcctccctgtgggctccagaaggtgcacagggaaccagctcaagagctctgaggcggtgcccctgaacagggaagtgaaaccaggacctgaggacggaactccctggggacttcagggctgactccaaactcttcatcagtgcttgctgtgtgatgtccagagatgcctccctcagtggcttttctgtgttgatgttgttgtgtgaggtatcactgaacaacatgaggctgagggttggggccctgagacctgcttccaggtatgctgttaaccagctgtaggactcggagcaatcctctcagcaggtgctaacagaattacagcagcaactgatagaatacctgatctccagcctccctccagctccaacattccaaaccttcaaaaagcagggcctgaaagttccttgtcctggagatatgtgatctaaggagcccagggagggcagtgcgcagcccattggcccaaaccccagtggtgggcgggctcttgggcactgtgtcaatcaggcagtacatacacctttggaacaagagtcttccagacatctttaattattttattttatttatttttgagacagagtcttgttctgtcgccccggctggagtgcaatggtgcgatcttggctcaccacaacctctgcctcccaggttcaagcaattctccctcagtctcccaagtagctgtgattacaggtgcccaccaccacgcccggctaatttttgtacgttttagtagaaatggggttttgccatgttggccaggctggtctcgaactcctgacctcaggtgatccgcctgccttgacctcccaaagtgctgggattacaggcgtaaaccactgcgcccggcctccagacatctttatagacagcctattgcaggagtaaagctcctctcatgagcatgtctgtcctttggtccacagtctcagccatgtgattctaatcccagctgctcactcccttagctgtgtgaccatgggcaagttactctccaaaactcagtttttgcatccatagaatggagggaataattaccatccccacctccatgggcagagttgagttgtgggggattatccaaatgtatcaggaggacagggctgacttggttcccctgagtaccggatctgcaggatccacagtgccacagactgtagagctggaggagtcctggggtactctccaattctgcctgtacaggatacagatggggaaactgaggcccagagaacagaaagggcgtggtaggaagcagagccaactctagatatctggtctcctgggtgccaggtcacctccccagtgggagctgggggagaagctggacctcacctcctctctttccagtgatgcctttgatttcaactatggcgtgtgtgtcatgaggatgcgggagggactcaacgtgtccaagatgatgcaggcgcacagtgagtacatgccccacccactcccagaaagttctagaacacattttttgtttttaaatggcagagggaaaaatgagtaagaaataaaaggttacagactcatagaaagtcgcctcttaatggtcccttagagcccatcagttttcccagaaagagaaagcaacgcattcaaggtcatgcttcccaggtggggcagagccaggactggaactcagggttccccaaatcacaattgggtcggggcaaaaggatctaatataggccggacatggtggctcacgcctgtaatcccagcgctttgggaggccaaggcaggtggatcacctgaggtcaggagttcaagaccagcctggccaacatggtgaaaccctgttgctactaaaaatacaaaaattagctgggtgtaagggtggtgcacacctataatcccagctacttgggaggctgaggcaggagaatcacttgaacccaggaggtggatgttgcagtgagccaagatcgcgccattgcactccatcctgggtgacaagagcaagactccatctcaaaaaaaaaaaaaaagatgtaatagaaaaccaggaaagaggggagaggaaaatgcctgcaggaagatgccagaatatgaaaatacataatgaccatgggaaccgggcattttggtccactgagtagggatgtgttttgcattttaaagtcatatatgactgcagactctgaattagaaatatttagagaggctgggtgtggtggctcgtttctgtaatcccagcactttgggaggctgaggcaggtggatcgcttgagtctaggagttcaacaccagcctgggtaacatagcaagaccccatctctactaaaacaaaaaattaaccaggtgtggtggcacgtgtctggagtctcagctacttgggaagctgagatgggaggatcgcttgaggccaggagtttgaggctgcagtgagccgtgattgcaccactgcactccagcctggctgacagagcaagaccctgtctcaaaaaaaaaaaaaaaaaaaaaaggaaatatctagaggtgtgaaagcaataacgtgtatggcaacaaatgagaggcagtgctggagagactgggagcttggagtccgcgtctcttgcagccaggagctgggtccgttcatttgtgccattgctgagggcatgtctggcacacggatgccaccaatatttacagagcagtaactccactcctgaccaacgctgctcttggtgctggggttacaggcacaccaaaagccaaaaagcctctgctcttgagaagctgacgctccagagggaaaagcagacacttgccagtggacccataagttatttcagattgtgagagtgtctggagaaaacgggtgcagggcgtagtggccagggaaggcctccctcaggagggggccttttgctgaggaggccagggctaggggaagtatgttccagctcagggcgcacccaccgccacggcccaaggtggggatgaacgtggcctgtttgaggggcaagaggaggccatgcgcgactggaatgtgaggagccgggcaggaggcaggtcagagggaggccaaggccaggtgcagtggggctgtggaggccaggtggggcatcgggactttcttcctagcattaagggagccctgtcaaggaggaacccacggtgccctcagacaaggagagcctgtgaacaaagctgcctcttcttttgcagttaaccccgtgtttgacccagcggaggacgggaaggaagccagcgccagaggtgccaggccatcagtctctggcgcttgtcagtgttcccactcagagctcagggcactctagccctgtggggtggctaggggtgggccacttgggaacttggtcgaggacaggtggttttttcttgtgacggtggtgcctgagtaactggagttgggaactggaggggcttggccgtgtcaaagattgccagcagccaggcgcagtggctcatgcctgtaatcccagcactgtgggaggctgaggcaggagttccaggctgcagtgagctgtgaccgcaccactacattgccagcctgggtgacagagtgagaccctgtctcaaaaaaagaaaaaatattgccaggaggtggagaattcagggtcacggcatcatggggacccacctagcaggctctggggcccttgtcccacccctgccaaggcccctctagccatgcagggtggggtgggattttccttcgtcctctcccaccatcactccgggagacagggggcctgaagtgcaggcgggagggctgctgtgggcatttgtgaagggtgcaggaggtgtttaagggaatggagagtgcacttccctacctacccagagggctctgggactgcccccacccccagtactcaccagaatcccgggagagagaagctgaaagcagggcaggggcacatcacagcactgagcgtcctgggccccggttcctgttccacctgccagagaacccgtgttcaacatcagaaggggcgttggcggggccctgggccaggcctgcctggatgcgcggctgctggctctgctctgacccgcccccacctcctgcagtggaccccaaggccctggtgaaggaggagcaggccaccaccatcttccagtcggagcagggcaagaagaccatagacatctactggctctttgacgatggaggtcagtgacccccttggatcagccctcctgcccggcgggggcggggtggtggtggtcttccttccttctccttcctggcctgctctcaaaggggacaggggctcctgggcccagcagtgagctcaggggagcccagagggacccctctgtctggcctctagttttttggttataaaatgggaagctttgagagaagagctgaagtcgccatgagatggaaacttctgactggatggcccttaggggcacaggcaggtgatataaatggggagatgggcggtgcccaggaaagctggaggaatatttttcacttcacaatgaaatataacctctcccattaaaaaacaaaaaaagtgactttaagctttattgctcctacctttgatagagtcacagatagaaagaaaatgtcttcgctccaatggaacgagtcctattaataactgccaaaataggctgagcacttactacctggctgacagggaattccctacctaatccagtccccaggtaggagctgtcatgattaactccgctttataaataaggaaaatgaggcacagaggattacaaggtgatatgtgacagctggcccttggtcttgtgtggagagacaacagagagggatgagggctcccacacgctggtcaaatattcactcttcaagaactgccaatgacctcgatttttatgtgaaactcctcaattattaaatgacttttgttttttattattctttttgagacggagtcttactttgtcgcccaggctgaagtgcagtggcatgatgtcggctcactgcaacctccgcctcctgggttcaagcgattctcctgcctcagcctcctgagtagctgggactacaggcggctgccaccacacccagctaatttttgtatttttatttttatttttattttatttatttatttatttatttatttatttatttatttatttatttattgagatggagtctcactctgttgcccaggctggagtgcaatggtgtgatctcggctcactgcaacctctgcctcctgagctcaagtgattctcctgcctcagcctcctgagtagctgggattataggtgtgcaccatcaggcccagctaattttttgtgttattagtagagatagggttttaccatgttggccaggttggtcttgaactcctgacctcaggtgatccacctgcctcggcctcccatagtgctgggattataggcatgagccatggcgcccggccgccagcttgtttatttaaatatgctgcacaagcacaaataaaccctaccccacagagcaccgtgtgcgacttgaattcagtcagccatgttcattatacagatgggtcgactggggtccagcgaggagaggaaggggtttgctaatggcagagcggggcaggaactcacatagtgctctgtcctgagtgtattcttgtcatgactcacggggactctccttgccaggcctcaccctcctcattccctatctccttggccgcaagaggaggtggagcaaatgcaagatccgtgtgttcgtaggcggccagattaacaggatggaccaggagagaaaggcgtaagtgtggagggctggcctgggggtgactgcagggaccagtgtcatcttagctccacccaaggctgtcccctaccctagatcctctaccaccacccccaggtgggcactgagattgtcccaaagcccagggccagctctctccaggccatggcagtgggcaggagcaggagcaggtttctctccattccagaagttgttctggtttcctgcccccttcaataaatgcagatgccctaggctttgctacgacagggaggggagttaggttgtaaagtcacaaatctctgggtttggataacaagaagcataaaaataagaaagaaaaggaatccattttttaaatttaaagttaagaaaagacaagaaaaatagaaaaaaaaaaagataaaaagaaaaacaaaaaacaaatctcctccaggaggaacctgtatgaaatgaaggatgggctgggccaaggcagctggatccaggagtccaggagttcgagaccaacctgggtgacatggcaaaatcctgtctctatgttttaaatttttatatattttaatttttttttttttttttgagatggattctcactctgtcacccaggctagagtgcagtgacgcaatctcggctcattgcaacctccgccccctgggttcaagcaattctcctgcctcagcctccctagtaaccaggattagaggcgtgcgctaccatgcccagatagtttttttgtatttttagtagagatggggtttcgccatgttggctaggctggtctcgaactcctgacctcaagtgatccacccacctcagcctcccaaagtgctgggattacaggtgtgagccactgcccccagccaatattttaaatttttatataaatattttatatatatttaaaaatttatatataattttttgaaaaaaggaaatgaaggctggagaacacgcctcctcctgagaaatgaagtaggggctagaatcctttagggcatcagtccccaacctttttggcaccagggactggtttcgtggaagacaatttttccacaggcttgggggagagtggtggttttgggatggttcaagctcattacatttattgtgcactttatttctattatgattacatggtaacatataatttaaaaatgatacaactcaccataatgtagaatcagtgggagccccgagcttgttttcctgcaactagatggttccatttgggagtgatgggagacagtgacagatcatcaggagggttcatggccctctaagatcctgcaagagggtttgtggccctctaagagtctaatgccactgctgatctgacaggaggcagaggtcagatggtaatgaaagcgatgaggagctgctgtaaatacagataaagctgcattcactgccatgcacccggttcctaacaggccatggtcagtacctgttggcagccccgggggtcaggggcccctgctttaaggcagtgtctccaatgcatgggatgcagactctgggtgagacaagaggtgactttagtggccaggggttgaggcagcaaataccactgagtcttttggtgagaagtgccttttaattctcctccaattctggggctgattctgcagaaagtcctggtttagccttggcccgtccttccctttggtaacctgtgcttgtctcccggagcaagaggagtaggctggatgcatgggcttggcaggcaatggcatctggccagaacttagtgaccctggtttatcgacatgggttttattggacacctctccctggcaagaggtgctggttttctgtttaaaattgtgatgttggctgggcacagtggctctgcctatagatcttggcactctggcagcaggccaaggcaggggattgcttgaggccaagggtttgagaccaggctgggcaacatagtgagagcccatctctaccaaaaaacttaaaaaaaaaattaactgtgaatggtggcatgtgcctgtagtactggccacttgaggctgaggcaggaggatcactgagcccagatcaaggctgcagtgagctatgattgcaccactgcactctagcctgggtgaaagaacagatgctatctctattttttaaataataatattttatcatgatataaaatttccctttgaaatgtatctaagtttggtccaggcgtggtggcttatgcttgcaatctcagcactttgggagaccaaggtgggtgaatcagctgaggtcaggagctcaaaaccagcctgaccaatatggtgaaaccccacctctactaaaaatacaaaaattagcttggcatggtagcatgtgcctgcagtcccaactactcaggaggctgagacaggaggattatttacacctgggaggcgaaggttgcagtgagccgagattgtgccactgtactccagcctgggcaactgagcaagactccatctcaaaaaaaaaaaaagtatctaattcagaatgtgagttggtttaaagagaaaaggaagtaaatagtaaggcaggtggcacacaagtatggagttgacagatgtcggcaggtggaattgggcagctgctgctttgagcaagttcaggtgaggtgggaggtggtaggctggaggttggctggaggatacagacagatggggcagtttgcccaaagtcatccaattaattagccaaagagaagaacccctgcccggtctctagtgccctttgcaactatcttggctgtgatgccccagggtcagagtaggaggggatcccccagcctacaccacccggtcctatgccaggatggcctcccgtgctccattctctatcacccgcagtgtgagttaagggaaacccagcaatcctatcactttgtcctcacccccactaagaactttctcctgggaaagccccttttctgcaatgctaaggaaagtgttgcttgggaaaagcagcatctgccttctctgtgatctccaaaaagtaaataagatacgagattgctctgcagtctctgctccctgtcctggctctgaatggaagctgggttcagtaggtttggtatagctcaaggctatggaagcctgggctaacagcatgtccttggtgggaaggttaggtaacccttcctctgcctccctctgtcccttggtgggccgcatcctctgctctctacataatcctggggcaagtctatgctgcccttgcctaggcactgcccaggcctgccagcctccgctgctactgcacaccaagacaaatctgcccacggctctgctttcaaaatttcactccccaagatcagggaccagcaacggcttgcctgctgggtcccagcctggtcctccagacttgtttcccatttcttcctctctcccagcacactccatgcatcccagccagctcctcactgccctgttccacccccctgcaccccgatgccttccctccttttgactgttccccaccaaccagtccagtggtccctaaccaggctggcacatcagaatcacctggggcattaccaaaaccatgtccttcccaggggttctgactcaatgatgggcaaggggttggggggagggcccaggcaggtgtatttttttgttagtttgatttggttttgttttgttttgttttgttttgtttttttgagatggagtcttgctctgtcacccagtctggagtgcagtcggctcactgcaagctccacctcccaggttcacaccattctcctgcctcagcctcccgagtagctgggactacaggcacctgctaccacggccggctaattttttgtatttttagtggagacggggtttcactgtgttaatcaggatggtcttgatctcctgacctcgtgatccacctgcctcggcctctcaaagtgctgggattacaggcatgagccactgcgcccggccaggtgtattgttttgaaggcttcttgggtaatgttagtgtagaccctcccctgccccacccgctttggcctgtaacaatcttacccctctttcaccgtccagccagaccgccacctctgtgaagtcttccctgactgctacaaaccacagtaggcttctccttccctgttagatgcaaagtcagtgccatctgtcttgctactcctgggtctgtacctagtttcttgtgggttatcttcgcttcctcagccgctctagaatttcctttattcaactttcctattccttagacctttgttactcaaagtgttgtctgtggactagcagcattgcatcccctgggagtgtgttagaaatgcagaatcccaggcctcaccccagaccagccgaatcagaatcagcgtggtaacaagatcctcagcagatgcgtagacatgtgaaaatttggggtgcgctagtacagagatggccaccagatacttgggaaagtctggtcaattacttttccgtttcacttgtcatcatctaacccattttgtgggtattcgtttcctgtctgccgctacccccatgttctacaagcgcaggctttgatctattttcctcactgctatgtagtcagtaggtgctcagtgaaaattagttgaatgaataaatacatttttaaaactctcaggctgggcatggtggctccagcctataatgccagcactttgggaggccgaggcaggatcacccgaggccaacatgacgaaaccctgtctctactaaaaatacaaaaattagccatgcgtggtggcacacatctgtaatcccaactactcgggaggctggggcatgagaattgcttgaacctgggaggcagaggttgcagtgaatcgagattgcaccactgcactccagcctgggagacagagcaagacgctgtctcaagaaaaagtaataacaataaaccctccatgtgtcctccaggatcatttctctgctgagcaagttccgactgggattccatgaagtccacatcctccctgacatcaaccagaaccctcgggctgagcagtaagttctgttttggggcttccaggcagaagggccaactgtgtgcctggagacccctctgccggctgccccctttttccttggtagactaggagcaagggtctctcctccaagcccttcctagatgtgtcagagggcacaacttctgcagtggctgtggccggggcctgtcccctccctggggctgaggggaccacagggcaaggcggctgcagcccctgacattgtgttaacacattggtgctgggagaggggaaaaggtgagtgacctgggcaacaacttccttcctccttccacgcaagggcaagagcacagattttaagcaaacccctgtgtgaatttgtagcagtgaccaatggcaggttcagcagggactgtttgctttccaaatggtataactccgtcttcttcaaataagacatttacaaacaggatttgtattttgtcaatcagtgtgcgtgaggttttccaggactgtctcctcactaaggtatgtttcctcctgacctcctagccctaacttttctcttacgtctcccagccgtaaggatgtcccccatctggacagggaaggaaatcaagacaagcagaaaggagctgtgtaatagtgatgcatacattggctccaaccatttgttaggagctgtgcttggtgctgcagaggcagagatgaggaatctgcagccccatcctccaagcatggctgcaggctggtgaaagccaagggcagttgcaatgctgcagagacagatcagggtgccaaggagagtaggattgtctctgttggtggaaaagcaaagccttgcgaaaggctggccttgatgatcaaaaagagatcagggagatcttccaggaagaagagacagcaggagcaacatacagaccccatctagcatctgatttttatttatttatttatttatttatttatgagatagagtcttgctctgtcacccaggctggagtgcagtggcgcaatcccagctcactgcaacctctgcctcccaggttcaagcaattcttctgcctcagcctcccaagtagctgggattacaggagcacaccactgtgcccggctaaatttggtatttttagtagagatggggtttcaccatgttggccaggctggtctcaaactcctgacctcaggtgacccacccgccttggcctcccaaagtgctgagattacaggcgtgagccactgcgcccagcctagcatcttattttaaaaatcccctccattgacctttcatctgcctccagcaactggaccatttctctcctccttggcacagccagacttcaagatgtttgcactctttgtcgacccctcctcccttcccctaatcctcccgctcccaacccactgcccccgctgtctgagaccactcttgccagcatcatcagtgacctccacgttgccacacccacagagtcctctctctctctacctttcagctgcacttgacagtgatccttcttgagaccgttccttcttttggcttccaagacaccccttccactggtttcctcctgcatcaggggcccttcctccagttcgtctgctggttcttcatccttgacctcactcgcccttgctggcatccttggggtttggccctgacccttttcccttctctccatttactctgtcccaggtgagctcatccatccttgtggcttcagatagcatcatctgaatgccaatcagccctacatctctctctctcttttttttttttgagacagtctcactccatcacccaggttggagtacagtggtaccatctcagctcactgcaacttccacatcccaggttcaagtgattctcctgcctcagtcctctgagtagctgggattacaggtgtgtgccaccacacccagctaatttttgtatttttagtagagacagcatttcgtcaggttggccaggctggtctcgaacttctgacctcaggtgatccgcccgcctcggcctcccaaagtgctgggattacaggcgtgagccactgtgcccggccccagccctaaatctctgtctttaatgatgtgagtcacatcgcacagaagacccccagcagcttctggtctcacttggggcagataaggaagccctgcccgactgggccctctctgcctgcctgtcctcacctcctcccacccttccctgcactcaccttgctccagcacacaggatccttcactgctcctcatatgagccaaacacgctctgcctcagggcttctgcacgttcagttctgttcgcttctgcaccccctgtcccgtgcatggctggttttgcaaggacagacttccttcaggtcccagaagggccttccccacccattattctctgtcccagtacttggttgtcccttcataagcttccacttcatatttatttgctacttgcttatcaccgtggctctgtgaggactggggacacaatctgatttgttcactgttgtgtagcacagagcctggtacagaatcatgctctgtaaatacctgctggatggtcgggtgggtcacaggtcagtggttgtgggcaacttgtgaaagttcagttggatgccagacccagccagcagagctgaattcaacatggaagccactttgtaaatggcagtgtccgatgggtttcagcctgaaaatgggagctgtggcaacactgccagctccccgcagggacctggcacccctagaaatggggttatcgtctcagccggcctcaacccactttctcgtccccagcaccaagaggtttgaggacatgattgcacccttccgtctgaatgatggcttcaaggatgaggccactgtcaacgagatgcggcgggactgcccctggaagatctcagatgaggagattacgaagaacagagtcaaggtgcagagaggggtgggggtgggaaacgcgacacatcactgggtcagggacgggtgtcctgcatgtcttgagctcccccagcccctcccctcgatcctccaccctgccttccactccggcccctgaggtatcctcaagccacagtcgttcaggctgatgggtaacccggctgtggaactcagtgctatccttgacctgggagcctggtcctcctgcccatcttgagtgagctctggcagtgggcttgactgcccggagtcctcctcctcctcctcctcctccacacttcctctatgccgggtggaagagatttctgagactcatggtgacagccaaggtataattagtcctgttaggccgggcatggtggctcacccctgtaatcccagcactttgggaggccgaggcaggtggatcacttgaggtcaggagttcaagaccagcctgaccaacatggtgagaccccatctctactaaaaatacaaaaaaaattagctgggcatggtggcaggcacctgtaatcccagctactcgggaggctgaggcaggagaatcgcttgaacctgggaggcagaggttgcagtgagccaagattgtgccattgcactccagcctgggtgacagagtgagactccgtctcaaaaaaaaaaaaaaaaattgtcctgtgggccaacacggctgcctgaccttccctgcttagcctctagaccctacccctgccacagctcagagctatggtgccccttcctggacagcaccttcaggactctaagggctaagaaagggtgtgtgcctgtagccatgctgtgagtgcgtcaaggtggggcaggctctaggagtgcgagcgagagcgatgggggcaagggccgggtcctacttctacccccagtgtcagtcattctccaccacgagggagcttaccccctgggggacatttggcaacctctggagacatttttgtttgtcacaactcgggggtggggctgctactgtcaggcagtgaggagagacctgcgatgctgccaaacatcctacgatgtgcaggacacttcccacaacaaggacttgtatgccccaaataactacagtgcaaggtccagaatcccttacccacgttaactcccttcccctcggtctcttggtctccaggatagggcatccgtccacgatcagttcctgagtgtcaatcatttctgaataatttgagctaggccttgggttggaaggagtctcccacccccaacccagtcccacgcaagtttggggacttccctaatctgtcagccccgagaccctgccccaaagggcccatgcagccatctggctctttggaaaatgctgaataaaacattgtgtccgaagaagaccttccaatactctgttacagaagaagtggggcaacctctcttttataaagtatttttagtgtaccaggccctctgccgggtgcttttgcataggttgtctcatttgatcctccccaaattcccctggagaaggtatcatcatacccattttacagatgaagatggtgaaggtcagggagacaacctgacttgcccaagttctctctgctatgaaatgtgagagctgagatctgaacctagtaaggtgttctctcttccctctaccctgctggttatggtcataaagtcaggcaaggaaaagccacagaatgcttcttggaggaggtgagcttggtgctccattactctgagggtccccttcttcctggagacaggagactctataagaatttatgaggcagcagagtctacaagtaaatcatgaatccagttgaaaatgttaatgaggccatagacgtggtgaaggattgagtgacctcgatgatatgggaagtgaccactcggctttctcccgcccagtcccttcggcaggtgaggctgaatgagattgtgctggattactcccgagacgctgctctcatcgtcatgtaagtagtgcccggctggtgggaggaccagtctgtccagagtcaggtgtctcagctctgggaaggggctcagcaggggcaccacggagggcccaagccttcccctaggaagcagaagggccaaagttcccataaacatagccctggcgattcttagcatgtggctgggcctgagcccgccccacacctgagctccagctggcaggggtcgagggcctcacgtgtcccaggcatcagtgacctccccttgccattgctttttcctgttggctgccttttcctaccaaattccacttggcaaagagggaacccagctctttcaagagggacatcaactcctggttgttcaggaattacttggccctccttggctatcggccattcccagctgatgttggttccaagcctgagcaacagaaacagaggcctgtcctagccctggctgttcctactggacccacgtccagttctgagccacccctgggtgtattagccagggctgagcaagcagaatgtgggatggaaggtgagagctatgcagcaaaggtctcagggtggctctgctctctctgaggcctgtaagaagaacatgattggccgggcacggtggctcatgcctgtaatcccagcactttgggaggctgaggcgggcagatcacctgaggtcgggaggtcgagaccagcctgaccaacatggagaaaccccgtctctactaaaaatacaaaattagctgggcgtggtggtgcatacctgtaatcccagctactcgggaggctgaggcaggagaattgcttgaacctgggaggcagaggttgcggtgagccgaggttgccccatttcactccagcctggcaacaagagcgaaactccgtctcaaaaaaaaaaaaaaaaaaaaaaagaaggaagaagaggaagaacatgatcagccaagccctcagctcaggggacaaggggtcttcgccaaggtaagtaactggcctctcctacatttcctgggggccaaccacctgggaatcagacagaagggatctttcggctctggtgatgtaccccactcccagacctgtcaccatctgacctggactgcagatgccaggttctgcatgacagccgaaatgttcgtggaaactgcttgttcagagcctgaagccaggaccaactacacaatttgcaaggcctaggacaaaatgaaaatgtggggcaccttgctcagaaactattaagaaggtctgtggtcttccctttcaaagcagtctcccttacatcctcacataggatgtatggaatttgttttttaaaaaatctcacagtggtggaaaggaggagggggtaggggttcaacacaactgatcatagtttgatcattgatgtagacagatgatgacgtgggcatgaaacgtcagggtatcatttttcaaacttcacctgtttgaacccttctataaatctgcaaaatgcatcctgccttggagagcaaccacaagtgcctcatcaagcttgctttctctggcaagaaggtccccaaaaacctagcgccacacactgttctaggaagatgtgctcagataggagggatccttcagctctggtgatacaacccattcccagacttgtcaccatctgacctagactgcagatgccaggatctaaggatattagattcatgagaggagacctcagaacaagtggtccattgagggtgataaaagcaactcaaactattttccccctacttctgttgcttgagtactgtgtacgttgcatgcatcccttactgctgtgtctgcaataccctctttcaggagagcaccagcaatgtttcttttatgtagtgtaagtgcccctttgagaagatcaaaacagcaaatgggttcagactgaaaatggccaatggcttctagcagatgagtagataaagcttgaggatacgcatcctcctaggtctcatcaaaggctagaagctgagcaaccagtttggagacctgacctggaggtttctggacctccagtctgtcttaagatgtccatgagggtttttcctccctggatgtctgaggattgactgccatcctgaatgaatcagtaagtatccaaactaggaaggtcgtgaccaactgactacttcagaggaaacaaatggtcgtctatgtccttcaccctgggaaggcaacagtacctaagatagaaattcaggaccaactagccaaaatatacaagaccacactggatatcatctttgcatttggatttagaactaattttggtggtggcaagacaactagctttggcatgatttatgattccttggattatgcaaagaaaagtgaacccaaacatagacttgcaagacatggcctgtatgagaagaaaaagacctcaagaaagcaatgaaaggaatgcaagaacagaatgaaggaagttaaggggactgtaaaggccacgttggtgctggcaaaaggtgggctggagattggatcacagccaaaggagtaaaggggcggcagtgtgttatctgcagccattgtggattttttacaagaagattaataaactaaaaactctcacatgaaaaaaagatgcccaggagaattcaaaaggcaccagcaccagttactcttcattgacaggacagaggtaaaatttttgcttttaccaattagcggaattttgtcaccaggagagtggttcaggcaattagaaacgtgcttggggctgggcatggtggctcacgcctgtaatcccagcactttgggaggccaaggcgggtggatcacctgaggtcaggagtttgagaccggcctggccaacatggtgaaaccccacctctactaaaaatacaaaaaaattagccaggcttggtggtgcacacctgtaatcccagctacttgggaggctgagacaggagaattgcttgaacctgggaggcagaggttgccgtgagccaagatcatgccactgcactccagcctggatgacagagctagaaatgtgcttggataatactcaaacgctacttccatacacgacagcagttttcagaaatcatgtcttagaacattcaggctgctatagcaaaataccatagactgggcttatcaataacagaaatttatttctcatggttctagaggctgggaagtcctagatcaaagcatggtaaattcagagtcagaggcagggctcctttcctgactcatggatgggccttctttctgtgtcctcacttggcggagggagccagggagctctctggggcctctttataagagcactaatcctattcataggtcacagggctccactctcataacctcatcatctcccaaaggccccacctcctaaaaccatcactctggggatatggatttcaacgtgtgaattttggggggacatgaatattcagactgtagcaaatggttctgacttatagtttctcttcttcccaatcacttcctatgtgccagtagacagtagagcatgtagaattcttcatgattcctaatatcctatgcagtgtgcaaacccttcttagcagatgtgtgtaagagtgcagaagtctaacaacagaccagaagcagaccattgtcagtctgcccctgggactcagtattcctcatgccccgatgtccccagtgccagtgtgtgctttttttttttttaaagaatgattgtattcatttctcagatagtgatataactttttttttttttttttttgaggcagagtcactctgtcacccaggctggagtgcagtggtgagatctcagctcactgcaacctccgcctcctgggttcaagtgattctcctgcctcagcctcctgaatatcaccacctcgcccggctaattttttgtatttttagtagagatggggttgcaccatggtggccaggctgatctcaaactcctgacctcaggtgatccacccacctcagcctcccaaagtgctgggattacaggcgtgagccacggtgcccagctgcagatagtgatataatttatagtgtagtcaattgtgttgaactgccgcttgcaacattttcttgtgtgacttaaggcattagaaaaaaagaaaaaaagaagaatgtcaagacggtgagagcagggcattagataaacaagggaccctccggagcagaaggccccgtgtgactgtgctggttgcacacccaggaagctggctctgcccagaacaatgcttcctggggctttagggacatgatttttttgtacaaagaaagtgccccgtgtttccttggagaacagtgataaggaaaggggctgggcttatctccaaacctcttgccaacacctagcagagaatgttcctaggacaagattggtccagggtgagcgctgggtccgagcgcaagacagtggaaatggctttgtcctgggacgcctccccagactcttccttgggtatggtgcctggtgggtgtgcatgggtgtgccagaccacggcttaatgagtgccgcctctgttcagagaggcatgtgtgcattttgtctatgcgattagcccactgtgtggccttgggtaagaccccatgtctctctagcctcagtttccctaattataaagagttaacaaaagtatttccaagattctctttcatgctaacatgctgtgattctaagtttatttgtcattaaaatgagtctcagctgggcatttatttgtcattaaaatgactcattaaaatgagtctcagctgggcatagtggctcatgcctgtaatcccagcactttgggaggctgaggctgaaggattgatcgagcccaggagttggagaacagcctgggcaacatagtgagaccctgtcactaccaaaagaaaaaaaaagaaagcaaaaaaaaaaaaagaatcagtctctcagtctcttaagccataagatgaagaatttcatcccgggaggtgaccacctgttggaatctctcccttcccaccccccatccctaccaccatcccccaaactcacagggaaaatcaatcccccacccaccagcctttgtgggatttgccaatacaagtaattataaatccagtgacccaagagaagacccctgcccagggcgtcccaccccatgccagtagctacagctgttgcccaaagaggccccagctattgggccaagtccaccgggaggacagagcagctgcatctctccatcactaatctccaacctggagccatgcctagtgtttctctacaagttcagtcagagggtccgcttcatcagaaccaccaggggactgtgaaaaatgcaagttcctcagtgccttccagaccaggctctagggtggagcccagaaattctgaggaagggaaaaaaaaaaaatctcccaagcctcggtgaaatgattagatcacattgtctagcatctgggagagcgtgcttggagcattttctagagccggtttgaggcagcacttgattgattgctgttcactaatcagtgggttatcaaatggccccgggtttgagctcagctaccccagcacagctgataaaccagcctcataaaaagcccagcaagctttgactagcctagcaacatattcctgttgggtccagacacctcttttttttctaaaaacactccctcctcaaagccaagcagcaataatcaaaatagtaataatcaacattgcattttatggcttgggcctctatatggtactcaaggcaataggccttatgaatttgcaaagccctaattttaagagagcatctcactctgtcacccaggctggagtgcagtggcaggatctcggctcacggcaacctctttgtttttttttgttgttgttgttttttctctttctgtaacctgtgactcaggcctctttgggcatctttggtcctataattttctttgttttggtggcggggtcttactctgtcacccaggctagagagcagtagtgagatctcagctcactgcaacccccacctcccgggactcaaacaatcctcctacctcagcctcccgagtagctgggactacaggcacataccaccaggcctggctagttttttgtatttttttatggagacagggttttaccatgttggcccaggctggtctccaactcctgagctcaagcaatccacctgccttggcctcccaaagtgctgggattacaggcatgagccactgtgcctggcctcaaaactctattataatcaccccctcactcccactttagagatgaggaagcagcttcagagaagttaagcaacttggccagggtcttgcagacaggaagtgggaattgcatctggagcctgtgactgtggttctgatgcagggctgtctttcacatctaggttagatctgaagtcgcctttctttgtggctaagagatgtaattctgaaaaaatgttcctttgttctggaacagttttatttctgaagattagtagctcaaggcatgcacatcctgtgagcaggaatagagcacgtcattgactggtgtgggggcgggggtgattttcaagacagctgtctctcggacaggtggacaggctgtgttgggggagggaactccatgctgaagcttgaaagtctgacataggtgtgttggatgttccccacccccatggtgcaggcaccatttctctcgtggcctttgaagtttctgaattcagtccccgaaatcatgtcctatttcctggatgttgtccgcctcttgcataactgctcagtcaggagagtttgggctcagtactcctatgtccctttctcctggaaagtcactaaatatttgaactcagatgactatagcttaatgaaatggccttggtccaacccaccttccctaatttttgagaccttttgtttgtttgtttgtttgtttgtttgtttgttttgagacagagtctcactctgttgcccaggctgcagtgcagtggcgcaatcatgctcactgcagcctcgacctcccaggctcaaacgatcctcccgcctcagcatcctgaggagctgggaccacaggcgtgtgccatcatgcccagctaatttttctattttttgtaaagacagggtctcaccatgttgcccaggctggtctcaaactcctgggctcaagtgatctgcccacctcggcctcccaaagtgctgggattacaggtgtgaccatgcctggcccgggacattgctttttaaaggagggtagggcttgtcccaggtgaagctttgtggatggaacttccaagtgtgacatagctgtttagtatcccagttacccttctcagaggaggttggagttgctgtgagcagaggctgctgcggagggaagatgtcaagacctcggttcgaattccagctttgccgccgctggcttagctgtcgcgtgctggtcagtactaagtggtgatgacagctgctgaccttacagagcactcactgtgtgccaggcattgtgctgtgcctgcgtgtgctttgcctgttttagcatcacaaacatcctgcgagggaggtttttgtgttcttgctttagggaagagaaactctgcaaaggtcatctggctgaggaagtggcaaagccacgactcggacgccagagactggctctgacctcagcgctccagcatcctcctcccgccccagttctcccacctgtgaaggagcgcggtgctgcgggccctgcccattccccagggggatgtacttggggaaaacagacactcaagtgagtcccacggaaggtgctggtgcccccacttcatgcggcaccagctggacctgtgagacactgctggagcccacagaccctcctggagcccagagctgggcagctgtggccatcccaatgcatttttggaattctccagatagtagaaaagtcacttcctgaaatagttggaagacatggctggacagcattcccagggcatctttttattcacgcagcattgcacagttaagacaaggggcctccccataggcagcggtggagtcttgctcccagggcctcctgcacagggcaggaggcaggacaaagacgctgagctggacaatgaatgaacaggaacatatcacattgctgtggccacaggctggcacagggctggagaggcaagcctggcatgaagcgggtggcctgatagggaagggtcgcccacttaacaaatatatactgagcctgactgtatcagactgtgttctaggcactgggaaaaggggggtgaataaggcagatctggcctccttgtgagcgaacattctaatgtggggagacaagcacataaatcagaagatgctgttgggactgtggagggctctgaaggcagtaaagtggggtgatgtgaggaagaggcgtgggcggcctgccctggaggagtgatcagggaggaggtgggtgcacttgcctgactcaaaggaagtgaccaggtgcagagctggggctgctcctttcctggtgggtggggagaacgtcaagtgcaaaggttggaggcaggagtgagcttggcatttttttaggaatggaaagaaagccacagggcatcgggggtgagcaaggcgagggtgggaggaggtgaggtcgtgggcttggcaaggactagatcccatagggcttgtgggccatggctttgtttagaaacgcttcacggcagaaggtccattctgggtcaggtttgtgcggaaagtggggaggtcattcttagggtgggtggaaggagctctgagggacggtaaacagactcgctgttctgaaaacaaactgggagctgggcgtgtggagcggccccgtggtaatctctcttctaccactttttcatgccttgcagcactttgcccatagggaggaaggggaagtgccccagctcgctgtacatggcctggctggagaccctgtcccaggacctcagacctccagtcatcctgatccgaggaaaccaggaaaacgtgctcaccttttactgccagtaactccaggctttgacatccctgtccacagctctgagtgtgtgggataagttggaacttgattgcctctagtccacagggatgagactcatgttctgttgcactttaagtggcagcatctgatgatctcaccgaaaaagatggtagatttccaaatctggctggactccacttccatgggacacattccctgggtcttgtgtttataggctagagaaatagcagatggagctgcaaggaaaactctctaaagcatcctattccttttaaaggatttcttttgattttgatgaccattaattaagagttcagtctttgatttgtatgcaaattggagtcccaatgctgggcgtgaatcttgacagtttctacagaccttcctgggtgaaagttcctaaatcatgccctgcttcctccaataggagaatgggagcctcacctgtaggacctacaggctctctaaggaatgcaggtctctctctgagcctccacagccaggcaaatacatatatatatattttttttttagatgaagttttttctcttgttgcccaggctagggtgtaatggcatgatctcaggtcactgcaacctcctcccgggttcaagcatttcttctgtctcagcctcccgaatagctgggattacaggcacctgccatcacacgagctaatttttgtatttttagtagagatggggtttcaccatgttgaccaggctggtgttgagctcctgacctcaggtgatccacccacctcggtctcccaaagtgctggggttacaggcctgagccactgcgcccggcccaggcaaatttcttgaaccacttctcactcccgtcactttcaataaggggtctttgatgtcttcactggttctttggacgagggacttttcgaacttttttggttgcaacacacagtaagaaatatacttcacactgagacttgcagcgcacacacacggaaacgaccaaaacaaaaatgtcacaaaacaatacttacccttccctgggggacgtcctccagtatgttctgttctgtttatttttcactgttggttgcaatccaataaaatgactttgggatccactcatgggtggggacccacacatttgaaaggcatggccacctttctgttgtgccttgcatttgtccacacacagggagtctggctgagctggggaaaggccacggctgggtgtcattgccattttcccagctcatctcaccgggaagaaaagcagattgacagaacacgtgaggaggggtattgatggcaggagagtcaaaaaagagttttaaagaaggggcaaggttgaaggagtctagtggcaagggtaagatttcaggcatggttaagaacagacgacaaggatgtcaggaatgaagatgtggagaggggtgtagagatggcaaggttggcaaggaacagataggcaggagcaggtccaagccaagcctagcccaagaccaggtgaaaggagaggggaggaggagccacctgcaagagatggaaagagcaggcggcagagggggctggcagggaggggctgttaagagtggggttggaggtgggagagaagctaggacaagggagatggagaaaggacctatacctggctcacggaaggccttcaggtcactacacgttgaacatccccagtgtttgagcccccaaagctagggtgcaagagcactgccatcgaatgccagtgggtgaggccaagtgagggtatttgcagctctagacataaccaagaagcgtaaaggtgagttgtttggtggtacgactgcctgtgccttcttccgatggcactggggtggctgaaggaacagacatctttgggtttcatcagcctcctccaagactgctgcagtgcctacactttagacttcagaaggagactaaagacttctagaatttagaaggagatctgaagtctcctttctggagttacaacccaaaggatgttagcatttctcaggtcatcccactgcaaagcccagaaggcttggggctcccaggctgctctgaagccccactgtctgaccgcctcagggcttgctacgagggactggggcacggccaagctgactaggaacagctctcgtgctcctgagggacctggaggatgggcctgcctcccagccattgagctggattctgggataattcttaactcgaaataaggggaagcatccatcagggaatgctggcctttctagagccacgtagaaaacaattttctggttcttcaaacctcaaagagtccttggtccaaaaaacagaatgttttggcttcgggtgtcaaaaaaaaaattttcacgatgtcagaaatagtatgtttttaacaatagtaatagctttgtaaaaaaataaaaagctttaacagcgaggccataaacaatgaaatgaataaaaacggtggtcattcagtcaacggaa

(The sequence listing continues in the following parts.)
